(19) United States
(12) Patent Application Publication
(10) Pub. No.: US 2023/0212606 A1
(43) Pub. Date: Jul. 6, 2023

(54) COMPOSITIONS AND METHODS FOR TREATING KCNQ4-ASSOCIATED HEARING LOSS

(71) Applicant: Akouos, Inc., Boston, MA (US)

(72) Inventors: Emmanuel John Simons, Brookline, MA (US); Robert Ng, Newton, MA (US); Linda B. Couto, Pleasanton, CA (US); Gregory Scott Robinson, Wilmington, MA (US); Katherine Diane Gribble, Chestnut Hill, MA (US)

(21) Appl. No.: 17/923,636

(22) PCT Filed: May 12, 2021
(86) PCT No.: PCT/US21/31939

§ 371 Date: Nov. 7, 2022

Related U.S. Application Data
(60) Provisional application No. 63/024,488, filed on May 13, 2020.

(51) Int. Cl. C12N 15/86; C07K 14/47

(52) U.S. Cl. CPC C12N 15/86; C07K 14/47; C12N 2750/14143

(57) ABSTRACT

The present disclosure provides technologies comprising a polynucleotide capable of expressing and/or inhibiting a KCNQ4 gene product.

### CROSS-REFERENCE TO RELATED APPLICATION

[0001] The application claims the benefit of U.S. Application Ser. No. 63/024,488 filed on May 13, 2020, the disclosure of which is hereby incorporated by reference in its entirety.

### SEQUENCE LISTING

[0002] The instant application contains a Sequence Listing which has been submitted electronically in ASCII format and is hereby incorporated by reference in its entirety. Said ASCII copy, created on May 11, 2021, is named 2013615-0286_SL.txt and is 819,483 bytes in size.

### BACKGROUND

[0003] There are many types of hearing loss. Some hearing loss is related to one or more genes. The present disclosure provides technologies related to KCNQ4-associated hearing loss.

### SUMMARY

[0004] The present disclosure recognizes that diseases or conditions associated with hearing loss can be treated via, e.g., replacement, addition and/or inhibition of certain gene products. The present disclosure further provides that gene products involved in development, function, and/or maintenance of ear cells, e.g., inner ear cells, e.g., hair cells can be useful for treatment of diseases or conditions associated with cell loss, e.g., hair cell loss. Accordingly, the present disclosure provides various technologies including those for methods of making, using, and/or administering compositions to express a gene product involved in the development, function, and/or maintenance of inner ear cells, e.g., hair cells.

[0005] Technologies provided by the present disclosure also include use of such compositions in treatment of hearing loss, or diseases or conditions associated with hearing loss. In some embodiments, a gene product can be encoded by a KCNQ4 gene or a characteristic portion thereof. In some embodiments, a gene product can be KCNQ4 protein or a characteristic portion thereof. In some embodiments, a variant KCNQ4 gene product is inhibited. In some embodiments, the present disclosure provides technologies to express functional KCNQ4. In some embodiments, the present disclosure provides technologies to inhibit a KCNQ4 variant. In some embodiments, the present disclosure provides technologies to both express functional KCNQ4 and inhibit a KCNQ4 variant.

[0006] The present disclosure further provides that viral delivery, e.g., via AAV particles, can be useful for administration of compositions to express gene products involved in development, function, and/or maintenance of inner ear cells, and/or treatment of hearing loss, or diseases or conditions associated with hearing loss. As described herein, AAV particles comprise (i) a AAV polynucleotide construct (e.g., a recombinant AAV polynucleotide construct), and (ii) a capsid comprising capsid proteins. In some embodiments, an AAV polynucleotide construct comprises KCNQ4 gene or a characteristic portion thereof. In some embodiments, AAV particles described herein are referred to as rAAV-KCNQ4 or rAAV-KCNQ4 particles. In some embodiments, AAV particles described herein comprise Anc80 AAV capsid proteins and are referred to as rAAV Anc80-KCNQ4 or rAAV Anc80-KCNQ4 particles.

[0007] Among other things, the present disclosure provides a construct comprising a coding sequence operably linked to a promoter, wherein the coding sequence encodes a Kv7.4 protein.

[0008] The present disclosure also provides a construct comprising a coding sequence operably linked to a promoter, wherein the coding sequence encodes a KCNQ4 inhibitory nucleic acid, which comprises a nucleotide sequence complementary to a KCNQ4 gene. In some embodiments, AAV particles described herein are referred to as rAAV-KCNQ4-Inhibitory-RNA or rAAV-KCNQ4-Inhibitory-RNA particles. In some embodiments, AAV particles described herein comprise Anc80 AAV capsid proteins and are referred to as rAAV Anc80-KCNQ4-Inhibitory-RNA or rAAV Anc80-KCNQ4-Inhibitory-RNA particles.

[0009] In some embodiments, the coding sequence is a KCNQ4 gene. In some embodiments, the KCNQ4 gene is a primate KCNQ4 gene. In some embodiments, the KCNQ4 gene is a human KCNQ4 gene. In some embodiments, the KCNQ4 gene is a murine (or mouse) KCNQ4 gene.

[0010] In some embodiments, the human KCNQ4 gene comprises a nucleic acid sequence according to SEQ ID NO: 1, SEQ ID NO: 2, SEQ ID NO: 3, SEQ ID NO: 4, SEQ ID NO: 5, SEQ ID NO: 6, SEQ ID NO: 7, SEQ ID NO: 8, SEQ ID NO: 9, SEQ ID NO: 10, SEQ ID NO: 25, SEQ ID NO: 26, SEQ ID NO: 27, SEQ ID NO: 28, SEQ ID NO: 29, SEQ ID NO: 30, or SEQ ID NO: 90. In some embodiments, the human KCNQ4 gene comprises a nucleic acid sequence according to SEQ ID NO: 9 or 10. In some embodiments, the mouse (or murine) KCNQ4 gene comprises a nucleic acid sequence according to SEQ ID NO: 91.

[0011] In some embodiments, the Kv7.4 protein is a primate Kv7.4 protein. In some embodiments, the Kv7.4 protein is a human Kv7.4 protein. In some embodiments, the Kv7.4 protein is a mouse Kv7.4 protein. In some embodiments, the Kv7.4 protein comprises an amino acid sequence according to SEQ ID NO: 11, SEQ ID NO: 12, SEQ ID NO: 13, or SEQ ID NO: 92.

[0012] In some embodiments, the promoter is an inducible promoter, a constitutive promoter, or a tissue-specific promoter. In some embodiments, the promotor is a cochlear hair cell-specific promoter. In some embodiments, the cochlear hair cell-specific promoter is a ATOH1 promoter, a POU4F3 promoter, a LHX3 promoter, a MYO7A promoter, a MYO6 promoter, a α9ACHR promoter, or a α10ACHR promoter. In some embodiments, the promoter is a CAG promoter, a CBA promoter, an smCBA promoter, a CMV promoter, or a CB7 promoter. In some embodiments, the promoter comprises a nucleic acid sequence according to SEQ ID NO: 22, SEQ ID NO: 23, SEQ ID NO: 24, SEQ ID NO: 297, SEQ ID NO: 298, SEQ ID NO: 299, SEQ ID NO: 300, SEQ ID NO: 301, SEQ ID NO: 302, SEQ ID NO: 303, SEQ ID NO: 304, SEQ ID NO: 305, SEQ ID NO: 306, SEQ ID NO: 307, SEQ ID NO: 308, SEQ ID NO: 309, and/or SEQ ID NO: 310.

[0013] In some embodiments, a construct of the present disclosure comprises two AAV inverted terminal repeats (ITRs), wherein the two AAV ITRs flank the coding sequence and promoter. In some embodiments, the two AAV ITRs are or are derived from AAV2 ITRs. In some embodiments, the two AAV ITRs comprise: (i) a 5′ ITR comprising a nucleic acid sequence according to SEQ ID NO: 15 and a 3′ ITR comprising a nucleic acid sequence according to SEQ ID NO: 16. In some embodiments, the two AAV ITRs comprise: (i) a 5′ ITR comprising a nucleic acid sequence according to SEQ ID NO: 19 and a 3′ ITR comprising a nucleic acid sequence according to SEQ ID NO: 20. In some embodiments, the construct comprises a nucleic acid sequence according to SEQ ID NO: 1, SEQ ID NO: 2, SEQ ID NO: 3, SEQ ID NO: 4, SEQ ID NO: 5, SEQ ID NO: 6, SEQ ID NO: 7, SEQ ID NO: 8, SEQ ID NO: 9, SEQ ID NO: 10, SEQ ID NO: 25, SEQ ID NO: 26, SEQ ID NO: 27, SEQ ID NO: 28, SEQ ID NO: 29, SEQ ID NO: 30 or SEQ ID NO: 90. In some embodiments, the construct comprises a nucleic acid sequence according to one or more of SEQ ID NOs: 1-41 and/or 42-70 and/or 96-97.

[0014] The present disclosure also provides a construct comprising a coding sequence operably linked to a promoter, wherein the coding sequence encodes a KCNQ4 inhibitory nucleic acid, which comprises a nucleotide sequence complementary to a KCNQ4 gene. In some embodiments, the KCNQ4 inhibitory nucleic acid is an miRNA, an siRNA, or shRNA. In some embodiments, the KCNQ4 inhibitory RNA comprises a sequence according to SEQ ID NO: 42, SEQ ID NO: 43, SEQ ID NO: 44, SEQ ID NO: 45, SEQ ID NO: 46, SEQ ID NO: 47, SEQ ID NO: 48, SEQ ID NO: 49, SEQ ID NO: 50, SEQ ID NO: 51, SEQ ID NO: 52, SEQ ID NO: 53, SEQ ID NO: 54, SEQ ID NO: 55, SEQ ID NO: 56, SEQ ID NO: 57, SEQ ID NO: 58, SEQ ID NO: 59, SEQ ID NO: 60, SEQ ID NO: 61, SEQ ID NO: 62, SEQ ID NO:63, SEQ ID NO: 64, SEQ ID NO: 65, SEQ ID NO: 66, SEQ ID NO: 67, SEQ ID NO: 68, SEQ ID NO: 69, SEQ ID NO: 70, SEQ ID NO: 96, or SEQ ID NO: 97. In some embodiments, the KCNQ4 inhibitory RNA is a gRNA. In some embodiments, the KCNQ4 inhibitory RNA comprises a sequence according to SEQ ID NO: 42, SEQ ID NO: 43, SEQ ID NO: 44, SEQ ID NO: 45, SEQ ID NO: 46, SEQ ID NO: 47, SEQ ID NO: 48. In some embodiments, the promoter is an H1 or U6 promoter.

[0015] In some embodiments, one or more KCNQ4 inhibitory nucleic acids are engineered into a miR scaffold targeting region in a chimeric intron of a construct described herein. For example, in some embodiments, one, two, three, four, five, six, seven, eight, nine, ten, or more KCNQ4 inhibitory nucleic acids are engineered into the miR scaffold targeting region in the chimeric intron of a construct described herein. In some embodiments, one or more KCNQ4 inhibitory nucleic acids are engineered into a miR scaffold targeting region in a 3′ UTR of a construct described herein. For example, in some embodiments, one, two, three, four, five, six, seven, eight, nine, ten, or more KCNQ4 inhibitory nucleic acids are engineered into the miR scaffold targeting region in a 3′ UTR of a construct described herein.

[0016] In some embodiments, the present disclosure provides a construct comprising an inhibitory nucleic acid, wherein the inhibitory nucleic acid is or comprises one or more of miR1-155; miR2-155; miR4-155; miR5-155; miR6-155; miR7-155 miR1-16; miR1-26; miR1-96; miR1-122; miR1-135; miR1-182; miR1-183; miR1-335; miR1-451 and/or an miRNA selected from the group consisting of miR1-155; miR2-155; miR4-155; miR5-155; miR6-155; miR7-155; miR1-16; miR1-26; miR1-96; miR1-122; miR1-135; miR1-182; miR1-183; miR1-335; miR1-451 and combinations thereof. In some embodiments, the present disclosure provides a construct comprising an inhibitory nucleic acid, wherein the inhibitory nucleic acid is or comprises one or more of miR2-26; mir6-26; and combinations thereof.

[0017] In some embodiments, the present disclosure provides an AAV particle, further comprising a construct as provided herein. In some embodiments, the AAV particle further comprises an AAV capsid, wherein the AAV capsid is or is derived from an AAV2, AAV3, AAV4, AAV5, AAV6, AAV7, AAV8, AAV9, AAV10, AAV-rh8, AAV-rh10, AAV-rh39, AAV-rh43 or AAV Anc80 capsid. In some embodiments, the AAV capsid is an AAV Anc80 capsid.

[0018] In some embodiments, the present disclosure provides a composition comprising at least one construct provided herein. In some embodiments, the composition comprises an AAV particle as provided herein. In some embodiments, a particle of the composition further comprises an AAV capsid, wherein the AAV capsid is or is derived from an AAV2, AAV3, AAV4, AAV5, AAV6, AAV7, AAV8, AAV9, AAV10, AAV-rh8, AAV-rh10, AAV-rh39, AAV-rh43 or AAV Anc80 capsid. In some embodiments, the AAV capsid of the AAV particle is an AAV Anc80 capsid. In some embodiments, the composition is a pharmaceutical composition. In some embodiments, the composition further comprises a pharmaceutically acceptable carrier.

[0019] The present disclosure also provides a cell. In some embodiments, the cell comprises one or more constructs, compositions and/or particles as provided herein. In some embodiments, the cell is in vivo, ex vivo, or in vitro. In some embodiments, the cell is a mammalian cell. In some embodiments, the mammalian cell is a human cell. In some embodiments, the cell is immortalized to generate a stable cell line. In some embodiments, the human cell is in the ear of a subject. In some embodiments, the cell has at least one copy of an endogenous KCNQ4 gene has at least one sequence variation. In some embodiments, the at least one sequence variation results in a loss-of-function gene product.

[0020] In some embodiments, the present disclosure provides a cell comprising a coding sequence operably linked to a promoter, wherein the coding sequence encodes a Kv7.4 protein. In some embodiments, the present disclosure provides a cell comprising a coding sequence operably linked to a promoter, wherein the coding sequence encodes a loss-of-function KCNQ4 variant gene product. In some embodiments, a KCNQ4 gene product is a Kv7.4 protein. In some such embodiments, the present disclosure provides a population of cells comprising one or more cells, wherein the population is or comprises a stable cell line.

[0021] In some embodiments, the inner ear cell is an outer hair cell. In some embodiments, the inner ear cell is in the ear of a subject. In some embodiments, the inner ear cell is in vitro or ex vivo.

[0022] The present disclosure also provides a system. In some embodiments, the system comprises at least one composition as provided herein.

[0023] The present disclosure provides a method comprising contacting an inner ear cell with at least one composition as described herein.

[0024] The present disclosure provides a system, a method, or a kit comprising a device for as described in FIGS. 32-35.

[0025] The present disclosure provides a method comprising contacting an inner ear cell with at least one construct as provided herein and one or more plasmids comprising an AAV Rep gene, AAV Cap gene, AAV VA gene, AAV Eta gene, and AAV E4 gene.

[0026] In some embodiments, the inner ear cell is an outer hair cell. In some embodiments, the inner ear cell is in the ear of a subject. In some embodiments, the inner ear cell is in vitro or ex vivo.

[0027] The present disclosure provides a method comprising introducing at least one composition as provided herein into the inner ear of a subject. In some embodiments, the composition is introduced into the cochlea of the subject. In some embodiments, the composition is introduced via a round window membrane injection.

[0028] In some embodiments, a method of the present disclosure further comprises measuring a hearing level of the subject. In some embodiments, a hearing level is measured by performing an auditory brainstem response (ABR) test. In some embodiments, the method further comprises comparing the hearing level of the subject to a reference hearing level. In some embodiments, the reference hearing level is a published or historical reference hearing level. In some embodiments, the hearing level of the subject is measured after any construct provided herein, and the reference hearing level is a hearing level of the subject that was measured before any construct as provided herein was introduced. In some embodiments, the method further comprises measuring a level of a KCNQ4 gene product in a subject. In some embodiments, the level of the KCNQ4 gene product is measured in the inner ear of the subject. In some embodiments, the level of the KCNQ4 gene product is measured in the cochlea of the subject. In some embodiments, the method further comprises comparing the level of a KCNQ4 gene product in the subject to a reference KCNQ4 gene product level. In some embodiments, the reference hearing level is a published or historical reference KCNQ4 gene product level. In some embodiments, the level of a KCNQ4 gene product in the subject is measured after any construct as provided herein is introduced, and the reference KCNQ4 gene product level is a KCNQ4 gene product level of the subject that was measured before any composition as provided herein was introduced.

[0029] The present disclosure also provides a method of treating hearing loss comprising administering at least one composition as provided herein to a subject in need thereof. In some embodiments, the present disclosure provides a method of treating hearing loss comprising administering at least one particle as provided herein, to a subject in need thereof.

[0030] In some embodiments, any constructs as provided herein may be used in the treatment of hearing loss. In some embodiments, any composition as provided herein may be used in the treatment of hearing loss. In some embodiments, any particle as provided herein may be used in the treatment of hearing loss. In some embodiments, the present disclosure provides a use of a construct as provided herein for manufacture of a medicament to treat hearing loss. In some embodiments, the present disclosure provides a use of a composition as provided herein for the manufacture of a medicament to treat hearing loss. In some embodiments, the present disclosure provides a use of a particle as provided herein for the manufacture of a medicament to treat hearing loss.

### Definitions

[0031] The scope of the present disclosure is defined by the claims appended hereto and is not limited by certain embodiments described herein. Those skilled in the art, reading the present specification, will be aware of various modifications that may be equivalent to such described embodiments, or otherwise within the scope of the claims. In general, terms used herein are in accordance with their understood meaning in the art, unless clearly indicated otherwise. Explicit definitions of certain terms are provided below; meanings of these and other terms in particular instances throughout this specification will be clear to those skilled in the art from context.

[0032] Use of ordinal terms such as “first,” “second,” “third,” etc., in the claims to modify a claim element does not by itself connote any priority, precedence, or order of one claim element over another or the temporal order in which acts of a method are performed, but are used merely as labels to distinguish one claim element having a certain name from another element having a same name (but for use of the ordinal term) to distinguish the claim elements.

[0033] The articles “a” and “an,” as used herein, should be understood to include plural referents unless clearly indicated to the contrary. Claims or descriptions that include “or” between one or more members of a group are considered satisfied if one, more than one, or all of the group members are present in, employed in, or otherwise relevant to a given product or process unless indicated to the contrary or otherwise evident from the context. In some embodiments, exactly one member of a group is present in, employed in, or otherwise relevant to a given product or process. In some embodiments, more than one, or all group members are present in, employed in, or otherwise relevant to a given product or process. It is to be understood that the present disclosure encompasses all variations, combinations, and permutations in which one or more limitations, elements, clauses, descriptive terms, etc., from one or more of the listed claims is introduced into another claim dependent on the same base claim (or, as relevant, any other claim) unless otherwise indicated or unless it would be evident to one of ordinary skill in the art that a contradiction or inconsistency would arise. Where elements are presented as lists (e.g., in Markush group or similar format), it is to be understood that each subgroup of the elements is also disclosed, and any element(s) can be removed from the group. It should be understood that, in general, where embodiments or aspects are referred to as “comprising” particular elements, features, etc., certain embodiments or aspects “consist,” or “consist essentially of,” such elements, features, etc. For purposes of simplicity, those embodiments have not in every case been specifically set forth in so many words herein. It should also be understood that any embodiment or aspect can be explicitly excluded from the claims, regardless of whether the specific exclusion is recited in the specification.

[0034] Throughout the specification, whenever a polynucleotide or polypeptide is represented by a sequence of letters (e.g., A, C, G, and T, which denote adenosine, cytidine, guanosine, and thymidine, respectively, in the case of a polynucleotide), such polynucleotides or polypeptides are presented in 5′ to 3′ or N-terminus to C-terminus order, from left to right.

[0035] Administration: As used herein, the term “administration” typically refers to administration of a composition to a subject or system to achieve delivery of an agent to a subject or system. In some embodiments, an agent is, or is included in, a composition; in some embodiments, an agent is generated through metabolism of a composition or one or more components thereof. Those of ordinary skill in the art will be aware of a variety of routes that may, in appropriate circumstances, be utilized for administration to a subject, for example a human. For example, in some embodiments, administration may be systematic or local. In some embodiments, a systematic administration can be intravenous. In some embodiments, administration can be local. Local administration can involve delivery to cochlear perilymph via, e.g., injection through a round-window membrane or into scala-tympani, a scala-media injection through endolymph, perilymph and/or endolymph following canalostomy. In some embodiments, administration may involve only a single dose. In some embodiments, administration may involve application of a fixed number of doses. In some embodiments, administration may involve dosing that is intermittent (e.g., a plurality of doses separated in time) and/or periodic (e.g., individual doses separated by a common period of time) dosing. In some embodiments, administration may involve continuous dosing (e.g., perfusion) for at least a selected period of time.

[0036] Allele: As used herein, the term “allele” refers to one of two or more existing genetic variants of a specific polymorphic genomic locus.

[0037] Amelioration: As used herein, the term “amelioration” refers to prevention, reduction or palliation of a state, or improvement of a state of a subject. Amelioration may include, but does not require, complete recovery or complete prevention of a disease, disorder or condition.

[0038] Amino acid: In its broadest sense, as used herein, the term “amino acid” refers to any compound and/or substance that can be incorporated into a polypeptide chain, e.g., through formation of one or more peptide bonds. In some embodiments, an amino acid has a general structure, e.g., H2N—C(H)(R)—COOH. In some embodiments, an amino acid is a naturally-occurring amino acid. In some embodiments, an amino acid is a non-natural amino acid; in some embodiments, an amino acid is a D-amino acid; in some embodiments, an amino acid is an L-amino acid. “Standard amino acid” refers to any of the twenty standard L-amino acids commonly found in naturally occurring peptides. “Nonstandard amino acid” refers to any amino acid, other than standard amino acids, regardless of whether it is prepared synthetically or obtained from a natural source. In some embodiments, an amino acid, including a carboxy- and/or amino-terminal amino acid in a polypeptide, can contain a structural modification as compared with general structure as shown above. For example, in some embodiments, an amino acid may be modified by methylation, amidation, acetylation, pegylation, glycosylation, phosphorylation, and/or substitution (e.g., of an amino group, a carboxylic acid group, one or more protons, and/or a hydroxyl group) as compared with a general structure. In some embodiments, such modification may, for example, alter circulating half-life of a polypeptide containing a modified amino acid as compared with one containing an otherwise identical unmodified amino acid. In some embodiments, such modification does not significantly alter a relevant activity of a polypeptide containing a modified amino acid, as compared with one containing an otherwise identical unmodified amino acid.

[0039] Approximately or About: As used herein, the terms “approximately” or “about” may be applied to one or more values of interest, including a value that is similar to a stated reference value. In some embodiments, the term “approximately” or “about” refers to a range of values that fall within ±10% (greater than or less than) of a stated reference value unless otherwise stated or otherwise evident from context (except where such number would exceed 100% of a possible value). For example, in some embodiments, the term “approximately” or “about” may encompass a range of values that within 10%, 9%, 8%, 7%, 6%, 5%, 4%, 3%, 2%, 1%, or less of a reference value.

[0040] Associated: As used herein, the term “associated” describes two events or entities as “associated” with one another, if the presence, level and/or form of one is correlated with that of the other. For example, a particular entity (e.g., polypeptide, genetic signature, metabolite, microbe, etc.) is considered to be associated with a particular disease, disorder, or condition, if its presence, level and/or form correlates with incidence of and/or susceptibility to the disease, disorder, or condition (e.g., across a relevant population). In some embodiments, two or more entities are physically “associated” with one another if they interact, directly or indirectly, so that they are and/or remain in physical proximity with one another. In some embodiments, two or more entities that are physically associated with one another are covalently linked to one another; in some embodiments, two or more entities that are physically associated with one another are not covalently linked to one another but are non-covalently associated, for example by means of hydrogen bonds, van der Waals interaction, hydrophobic interactions, magnetism, and combinations thereof.

[0041] Biologically active: As used herein, the term “biologically active” refers to an observable biological effect or result achieved by an agent or entity of interest. For example, in some embodiments, a specific binding interaction is a biological activity. In some embodiments, modulation (e.g., induction, enhancement, or inhibition) of a biological pathway or event is a biological activity. In some embodiments, presence or extent of a biological activity is assessed through detection of a direct or indirect product produced by a biological pathway or event of interest.

[0042] Characteristic portion: As used herein, the term “characteristic portion,” in the broadest sense, refers to a portion of a substance whose presence (or absence) correlates with presence (or absence) of a particular feature, attribute, or activity of the substance. In some embodiments, a characteristic portion of a substance is a portion that is found in a given substance and in related substances that share a particular feature, attribute or activity, but not in those that do not share the particular feature, attribute or activity. In some embodiments, a characteristic portion shares at least one functional characteristic with the intact substance. For example, in some embodiments, a “characteristic portion” of a protein or polypeptide is one that contains a continuous stretch of amino acids, or a collection of continuous stretches of amino acids, that together are characteristic of a protein or polypeptide. In some embodiments, each such continuous stretch generally contains at least 2, 5, 10, 15, 20, 50, or more amino acids. In general, a characteristic portion of a substance (e.g., of a protein, antibody, etc.) is one that, in addition to a sequence and/or structural identity specified above, shares at least one functional characteristic with the relevant intact substance. In some embodiments, a characteristic portion may be biologically active.

[0043] Characteristic sequence: As used herein, the term “characteristic sequence” is a sequence that is found in all members of a family of polypeptides or nucleic acids, and therefore can be used by those of ordinary skill in the art to define members of the family.

[0044] Characteristic sequence element: As used herein, the phrase “characteristic sequence element” refers to a sequence element found in a polymer (e.g., in a polypeptide or nucleic acid) that represents a characteristic portion of that polymer. In some embodiments, presence of a characteristic sequence element correlates with presence or level of a particular activity or property of a polymer. In some embodiments, presence (or absence) of a characteristic sequence element defines a particular polymer as a member (or not a member) of a particular family or group of such polymers. A characteristic sequence element typically comprises at least two monomers (e.g., amino acids or nucleotides). In some embodiments, a characteristic sequence element includes at least 2, 3, 4, 5, 6, 7, 8, 9, 10, 11, 12, 13, 14, 15, 20, 25, 30, 35, 40, 45, 50, or more monomers (e.g., contiguously linked monomers). In some embodiments, a characteristic sequence element includes at least first and second stretches of contiguous monomers spaced apart by one or more spacer regions whose length may or may not vary across polymers that share a sequence element.

[0045] Cleavage: As used herein, the term “cleavage” refers to generation of a break in DNA. For example, in some embodiments, cleavage could refer to either a single-stranded break or a double-stranded break depending on a type of nuclease that may be employed to cause such a break.

[0046] Combination therapy: As used herein, the term “combination therapy” refers to those situations in which a subject is simultaneously exposed to two or more therapeutic regimens (e.g., two or more therapeutic agents). In some embodiments, two or more agents may be administered simultaneously. In some embodiments, two or more agents may be administered sequentially. In some embodiments, two or more agents may be administered in overlapping dosing regimens.

[0047] Comparable: As used herein, the term “comparable” refers to two or more agents, entities, situations, sets of conditions, subjects, populations, etc., that may not be identical to one another but that are sufficiently similar to permit comparison therebetween so that one skilled in the art will appreciate that conclusions may reasonably be drawn based on differences or similarities observed. In some embodiments, comparable sets of agents, entities, situations, sets of conditions, subjects, populations, etc. are characterized by a plurality of substantially identical features and one or a small number of varied features. Those of ordinary skill in the art will understand, in context, what degree of identity is required in any given circumstance for two or more such agents, entities, situations, sets of conditions, subjects, populations, etc. to be considered comparable. For example, those of ordinary skill in the art will appreciate that sets of agents, entities, situations, sets of conditions, subjects, populations, etc. are comparable to one another when characterized by a sufficient number and type of substantially identical features to warrant a reasonable conclusion that differences in results obtained or phenomena observed under or with different sets of circumstances, stimuli, agents, entities, situations, sets of conditions, subjects, populations, etc. are caused by or indicative of the variation in those features that are varied.

[0048] Construct: As used herein, the term “construct” refers to a composition including a polynucleotide capable of carrying at least one heterologous polynucleotide. In some embodiments, a construct can be a plasmid, a transposon, a cosmid, an artificial chromosome (e.g., a human artificial chromosome (HAC), a yeast artificial chromosome (YAC), a bacterial artificial chromosome (BAC), or a P1-derived artificial chromosome (PAC)) or a viral construct, and any Gateway® plasmids. A construct can, e.g., include sufficient cis-acting elements for expression; other elements for expression can be supplied by the host primate cell or in an in vitro expression system. A construct may include any genetic element (e.g., a plasmid, a transposon, a cosmid, an artificial chromosome, or a viral construct, etc.) that is capable of replicating when associated with proper control elements. Thus, in some embodiments, “construct” may include a cloning and/or expression construct and/or a viral construct (e.g., an adeno-associated virus (AAV) construct, an adenovirus construct, a lentivirus construct, or a retrovirus construct).

[0049] Conservative: As used herein, the term “conservative” refers to instances describing a conservative amino acid substitution, including a substitution of an amino acid residue by another amino acid residue having a side chain R group with similar chemical properties (e.g., charge or hydrophobicity). In general, a conservative amino acid substitution will not substantially change functional properties of interest of a protein, for example, ability of a receptor to bind to a ligand. Examples of groups of amino acids that have side chains with similar chemical properties include: aliphatic side chains such as glycine (Gly, G), alanine (Ala, A), valine (Val, V), leucine (Leu, L), and isoleucine (Ile, I); aliphatic-hydroxyl side chains such as serine (Ser, S) and threonine (Thr, T); amide-containing side chains such as asparagine (Asn, N) and glutamine (Gln, Q); aromatic side chains such as phenylalanine (Phe, F), tyrosine (Tyr, Y), and tryptophan (Trp, W); basic side chains such as lysine (Lys, K), arginine (Arg, R), and histidine (His, H); acidic side chains such as aspartic acid (Asp, D) and glutamic acid (Glu, E); and sulfur-containing side chains such as cysteine (Cys, C) and methionine (Met, M). Conservative amino acids substitution groups include, for example, valine/leucine/isoleucine (Val/Leu/Ile, V/L/I), phenylalanine/tyrosine (Phe/Tyr, F/Y), lysine/arginine (Lys/Arg, K/R), alanine/valine (Ala/Val, A/V), glutamate/aspartate (Glu/Asp, E/D), and asparagine/glutamine (Asn/Gln, N/Q). In some embodiments, a conservative amino acid substitution can be a substitution of any native residue in a protein with alanine, as used in, for example, alanine scanning mutagenesis. In some embodiments, a conservative substitution is made that has a positive value in the PAM250 log-likelihood matrix disclosed in Gonnet et al., 1992, Science 256:1443-1445, which is incorporated herein by reference in its entirety. In some embodiments, a substitution is a moderately conservative substitution wherein the substitution has a nonnegative value in the PAM250 log-likelihood matrix. One skilled in the art would appreciate that a change (e.g., substitution, addition, deletion, etc.) of amino acids that are not conserved between the same protein from different species is less likely to have an effect on the function of a protein and therefore, these amino acids should be selected for mutation. Amino acids that are conserved between the same protein from different species should not be changed (e.g., deleted, added, substituted, etc.), as these mutations are more likely to result in a change in function of a protein.

CONSERVATIVE AMINO ACID SUBSTITUTIONS

| For | | |
|---|---|---|
| Amino Acid | Code | Replace With |
| Alanine | A | D-ala, Gly, Aib, β-Ala, Acp, L-Cys, D-Cys |
| Arginine | R | D-Arg, Lys, D-Lys, homo-Arg, D-homo-Arg, |
| | | Met, Ile, D-Met, D-Ile, Orn, D-Orn |
| Asparagine | N | D-Asn, Asp, D-Asp, Glu, D-Glu, Gln, D-Gln |
| Aspartic | D | D-Asp, D-Asn, Asn, Glu, D-Glu, Gln, D-Gln |
| Acid | | |
| Cysteine | C | D-Cys, S-Me-Cys, Met, D-Met, Thr, D-Thr |
| Glutamine | Q | D-Gln, Asn, D-Asn, Glu, D-Glu, Asp, D-Asp |
| Glutamic | E | D-Glu, D-Asp, Asp, Asn, D-Asn, Gln, D-Gln |
| Acid | | |
| Glycine | G | Ala, D-Ala, Pro, D-Pro, Aib, β-Ala, Acp |
| Isoleucine | I | D-Ile, Val, D-Val, AdaA, AdaG, Leu, D-Leu, |
| | | Met, D-Met |
| Leucine | L | D-Leu, Val, D-Val, AdaA, AdaG, Leu, D-Leu, |
| | | Met, D-Met |
| Lysine | K | D-Lys, Arg, D-Arg, homo-Arg, D-homo-Arg, |
| | | Met, D-Met, Ile, D-Ile, Orn, D-Orn |
| Methionine | M | D-Met, S-Me-Cys, Ile, D-Ile, Leu, D-Leu, |
| | | Val, D-Val |
| Phenylalanine | F | D-Phe, Tyr, D-Thr, L-Dopa, His, D-His, Trp, |
| | | D-Trp, Trans-3,4 or 5-phenylproline, AdaA, |
| | | AdaG, cis-3,4 or 5-phenylproline, Bpa, D-Bpa |
| Proline | P | D-Pro, L-I-thioazolidine-4-carboxylic acid, |
| | | D-or-L-1-oxazolidine-4-carboxylic acid |
| | | (Kauer, U.S. Pat. No. 4,511,390) |
| Serine | S | D-Ser, Thr, D-Thr, allo-Thr, Met, D-Met, |
| | | Met (O), D-Met (O), L-Cys, D-Cys |
| Threonine | T | D-Thr, Ser, D-Ser, allo-Thr, Met, D-Met, |
| | | Met (O), D-Met (O), Val, D-Val |
| Tyrosine | Y | D-Tyr, Phe, D-Phe, L-Dopa, His, D-His |
| Valine | V | D-Val, Leu, D-Leu, Ile, D-Ile, Met, D-Met, |
| | | AdaA, AdaG |

[0050] Control: As used herein, the term “control” refers to the art-understood meaning of a “control” being a standard against which results are compared. Typically, controls are used to augment integrity in experiments by isolating variables in order to make a conclusion about such variables. In some embodiments, a control is a reaction or assay that is performed simultaneously with a test reaction or assay to provide a comparator. For example, in one experiment, a “test” (i.e., a variable being tested) is applied. In a second experiment, a “control,” the variable being tested is not applied. In some embodiments, a control is a historical control (e.g., of a test or assay performed previously, or an amount or result that is previously known). In some embodiments, a control is or comprises a printed or otherwise saved record. In some embodiments, a control is a positive control. In some embodiments, a control is a negative control.

[0051] Determining, measuring, evaluating, assessing, assaying and analyzing: As used herein, the terms “determining,” “measuring,” “evaluating,” “assessing,” “assaying,” and “analyzing” may be used interchangeably to refer to any form of measurement, and include determining if an element is present or not. These terms include both quantitative and/or qualitative determinations. Assaying may be relative or absolute. For example, in some embodiments, “Assaying for the presence of can be determining an amount of something present and/or determining whether or not it is present or absent.

[0052] Editing: As used herein, the term “edit,” “editing,” or “edited” refers to a method of altering a nucleic acid sequence of a polynucleotide (e.g., a wild type naturally occurring nucleic acid sequence or a mutated naturally occurring sequence) by selective deletion of a specific nucleic acid sequence (e.g., a genomic target sequence), a given specific inclusion of new sequence through use of an exogenous nucleic acid sequence, or a replacement of nucleic acid sequence with an exogenous nucleic acid sequence. In some embodiments, such a specific genomic target includes, but may be not limited to, a chromosomal region, mitochondrial DNA, a gene, a promoter, an open reading frame or any nucleic acid sequence.

[0053] Engineered: In general, as used herein, the term “engineered” refers to an aspect of having been manipulated by the hand of man. For example, a cell or organism is considered to be “engineered” if it has been manipulated so that its genetic information is altered (e.g., new genetic material not previously present has been introduced, for example by transformation, mating, somatic hybridization, transfection, transduction, or other mechanism, or previously present genetic material is altered or removed, for example by substitution or deletion mutation, or by mating protocols). As is common practice and is understood by those in the art, progeny of an engineered polynucleotide or cell are typically still referred to as “engineered” even though the actual manipulation was performed on a prior entity.

[0054] Excipient: As used herein, the term “excipient” refers to an inactive (e.g., non-therapeutic) agent that may be included in a pharmaceutical composition, for example to provide or contribute to a desired consistency or stabilizing effect. In some embodiments, suitable pharmaceutical excipients may include, for example, starch, glucose, lactose, sucrose, gelatin, malt, rice, flour, chalk, silica gel, sodium stearate, glycerol monostearate, talc, sodium chloride, dried skim milk, glycerol, propylene, glycol, water, ethanol and the like.

[0055] Expression: As used herein, the term “expression” of a nucleic acid sequence refers to generation of any gene product (e.g., transcript, e.g., mRNA, e.g., polypeptide, etc.) from a nucleic acid sequence. In some embodiments, a gene product can be a transcript. In some embodiments, a gene product can be a polypeptide. In some embodiments, expression of a nucleic acid sequence involves one or more of the following: (1) production of an RNA template from a DNA sequence (e.g., by transcription); (2) processing of an RNA transcript (e.g., by splicing, editing, 5′ cap formation, and/or 3′ end formation); (3) translation of an RNA into a polypeptide or protein; and/or (4) post-translational modification of a polypeptide or protein.

[0056] Functional: As used herein, the term “functional” describes something that exists in a form in which it exhibits a property and/or activity by which it is characterized. For example, in some embodiments, a “functional” biological molecule is a biological molecule in a form in which it exhibits a property and/or activity by which it is characterized. In some such embodiments, a functional biological molecule is characterized relative to another biological molecule which is non-functional in that the “non-functional” version does not exhibit the same or equivalent property and/or activity as the “functional” molecule. A biological molecule may have one function, two functions (i.e., bifunctional) or many functions (i.e., multifunctional).

[0057] Gene: As used herein, the term “gene” refers to a DNA sequence in a chromosome that codes for a gene product (e.g., an RNA product, e.g., a polypeptide product). In some embodiments, a gene includes coding sequence (i.e., sequence that encodes a particular product). In some embodiments, a gene includes non-coding sequence. In some particular embodiments, a gene may include both coding (e.g., exonic) and non-coding (e.g., intronic) sequence. In some embodiments, a gene may include one or more regulatory sequences (e.g., promoters, enhancers, etc.) and/or intron sequences that, for example, may control or impact one or more aspects of gene expression (e.g., cell-type-specific expression, inducible expression, etc.). As used herein, the term “gene” generally refers to a portion of a nucleic acid that encodes a polypeptide or fragment thereof; the term may optionally encompass regulatory sequences, as will be clear from context to those of ordinary skill in the art. This definition is not intended to exclude application of the term “gene” to non-protein-coding expression units but rather to clarify that, in most cases, the term as used in this document refers to a polypeptide-coding nucleic acid. In some embodiments, a gene may encode a polypeptide, but that polypeptide may not be functional, e.g., a gene variant may encode a polypeptide that does not function in the same way, or at all, relative to the wild-type gene. In some embodiments, a gene may encode a transcript which, in some embodiments, may be toxic beyond a threshold level. In some embodiments, a gene may encode a polypeptide, but that polypeptide may not be functional and/or may be toxic beyond a threshold level.

[0058] Genome Editing System: As used herein, the term “genome editing system” refers to any system having DNA editing activity. Among other things, DNA editing activity can include deleting, replacing, or inserting a DNA sequence in a genome. In some embodiments, a genome editing system comprises RNA-guided DNA editing activity. In some embodiments, a genome editing system of the present disclosure includes more than one component. In some embodiments, a genome editing system includes at least two components adapted from naturally occurring CRISPR systems: a guide RNA (gRNA) and an RNA-guided nuclease. In certain embodiments, these two components form a complex that is capable of associating with a specific nucleic acid sequence and editing DNA in or around that nucleic acid sequence, for instance by making one or more of a single-strand break (an SSB or nick), a double-strand break (a DSB) and/or a point mutation. In some embodiments, genome editing systems of the present disclosure lack a component having cleavage activity but maintain a component(s) having DNA binding activity. In some such embodiments, a genome editing system of the present disclosure comprises a component(s) that functions as an inhibitor of DNA activity, e.g., transcription, translation, etc. In some embodiments, a genome editing system of the present disclosure comprises a component(s) fused to modulators to modulate target DNA expression.

[0059] Genomic modification: As used herein, the term “genomic modification” refers to a change made in a genomic region of a cell that permanently alters a genome (e.g., an endogenous genome) of that cell. In some embodiments, such changes are in vitro, ex vivo, or in vivo. In some embodiments, every cell in a living organism is modified. In some embodiments, only a particular set of cells such as, e.g., in a specific organ, is modified. For example, in some embodiments, a genome is modified by deletion, substitution, or addition of one or more nucleotides from one or more genomic regions. In some embodiments, a genomic modification is performed in a stem cell or undifferentiated cell. In some such embodiments, progeny of a genomically modified cell or organism will also be genomically modified, relative to a parental genome prior to modification. In some embodiments, a genomic modification is performed on a mature or post-mitotic cell such that no progeny will be generated and thus, no genomic modifications propagated other than in a particular cell.

[0060] Hearing loss: As used herein, the term “hearing loss” may be used to a partial or total inability of a living organism to hear. In some embodiments, hearing loss may be acquired. In some embodiments, hearing loss may be hereditary. In some embodiments, hearing loss may be genetic. In some embodiments, hearing loss may be as a result of disease or trauma (e.g., physical trauma, treatment with one or more agents resulting in hearing loss, etc.). In some embodiments, hearing loss may be due to one or more known genetic causes and/or syndromes. In some embodiments, hearing loss may be of unknown etiology. In some embodiments, hearing loss may or may not be mitigated by use of hearing aids or other treatments.

[0061] Heterologous: As used herein, the term “heterologous” may be used in reference to one or more regions of a particular molecule as compared to another region and/or another molecule. For example, in some embodiments, heterologous polypeptide domains, refers to the fact that polypeptide domains do not naturally occur together (e.g., in the same polypeptide). For example, in fusion proteins generated by the hand of man, a polypeptide domain from one polypeptide may be fused to a polypeptide domain from a different polypeptide. In such a fusion protein, two polypeptide domains would be considered “heterologous” with respect to each other, as they do not naturally occur together.

[0062] Identity: As used herein, the term “identity” refers to overall relatedness between polymeric molecules, e.g., between nucleic acid molecules (e.g., DNA molecules and/or RNA molecules) and/or between polypeptide molecules. In some embodiments, polymeric molecules are considered to be “substantially identical” to one another if their sequences are at least 25%, 30%, 35%, 40%, 45%, 50%, 55%, 60%, 65%, 70%, 75%, 80%, 85%, 90%, 95%, or 99% identical. Calculation of percent identity of two nucleic acid or polypeptide sequences, for example, can be performed by aligning two sequences for optimal comparison purposes (e.g., gaps can be introduced in one or both of a first and a second sequences for optimal alignment and non-identical sequences can be disregarded for comparison purposes). In some embodiments, a length of a sequence aligned for comparison purposes is at least 30%, at least 40%, at least 50%, at least 60%, at least 70%, at least 80%, at least 90%, at least 95%, or substantially 100% of length of a reference sequence; nucleotides at corresponding positions are then compared. When a position in the first sequence is occupied by the same residue (e.g., nucleotide or amino acid) as a corresponding position in the second sequence, then the two molecules (i.e., first and second) are identical at that position. Percent identity between two sequences is a function of the number of identical positions shared by the two sequences being compared, taking into account the number of gaps, and the length of each gap, which needs to be introduced for optimal alignment of the two sequences. Comparison of sequences and determination of percent identity between two sequences can be accomplished using a mathematical algorithm. For example, percent identity between two nucleotide sequences can be determined using the algorithm of Meyers and Miller (CABIOS, 1989, 4: 11-17, which is herein incorporated by reference in its entirety), which has been incorporated into the ALIGN program (version 2.0). In some embodiments, nucleic acid sequence comparisons made with the ALIGN program use a PAM120 weight residue table, a gap length penalty of 12 and a gap penalty of 4.

[0063] Inhibitory nucleic acid: As used herein, the term “inhibitory nucleic acid” refers to a nucleic acid sequence that hybridizes specifically to a target gene, including target DNA or RNA (e.g., a target mRNA (e.g., a potassium channel gene product, e.g., a potassium channel mRNA, e.g., KCNQ4 mRNA)). Thereby, in some embodiments, an inhibitory nucleic acid inhibits expression and/or activity of a target gene. In some embodiments, an inhibitory nucleic acid is a short interfering RNA (siRNA), a short hairpin RNA (shRNA), a microRNA (or “miRNA”), an antisense oligonucleotide, a guide RNA (gRNA), or a ribozyme. In some embodiments, an inhibitory nucleic acid is between about 10 nucleotides to about 30 nucleotides in length (e.g., about 10 nucleotides to about 28 nucleotides, about 10 nucleotides to about 26 nucleotides, about 10 nucleotides to about 24 nucleotides, about 10 nucleotides to about 22 nucleotides, about 10 nucleotides to about 20 nucleotides, about 10 nucleotides to about 18 nucleotides, about 10 nucleotides to about 16 nucleotides, about 10 nucleotides to about 14 nucleotides, about 10 nucleotides to about 12 nucleotides, about 12 nucleotides to about 30 nucleotides, about 12 nucleotides to about 28 nucleotides, about 12 nucleotides to about 26 nucleotides, about 12 nucleotides to about 24 nucleotides, about 12 nucleotides to about 22 nucleotides, about 12 nucleotides to about 20 nucleotides, about 12 nucleotides to about 18 nucleotides, about 12 nucleotides to about 16 nucleotides, about 12 nucleotides to about 14 nucleotides, about 16 nucleotides to about 30 nucleotides, about 16 nucleotides to about 28 nucleotides, about 16 nucleotides to about 26 nucleotides, about 16 nucleotides to about 24 nucleotides, about 16 nucleotides to about 22 nucleotides, about 16 nucleotides to about 20 nucleotides, about 16 nucleotides to about 18 nucleotides, about 18 nucleotides to about 30 nucleotides, about 18 nucleotides to about 28 nucleotides, about 18 nucleotides to about 26 nucleotides, about 18 nucleotides to about 24 nucleotides, about 18 nucleotides to about 22 nucleotides, about 18 nucleotides to about 20 nucleotides, about 20 nucleotides to about 30 nucleotides, about 20 nucleotides to about 28 nucleotides, about 20 nucleotides to about 26 nucleotides, about 20 nucleotides to about 24 nucleotides, about 20 nucleotides to about 22 nucleotides, about 22 nucleotides to about 30 nucleotides, about 22 nucleotides to about 28 nucleotides, about 22 nucleotides to about 26 nucleotides, about 22 nucleotides to about 24 nucleotides, about 24 nucleotides to about 30 nucleotides, about 24 nucleotides to about 28 nucleotides, about 24 nucleotides to about 26 nucleotides, about 26 nucleotides to about 30 nucleotides, about 26 nucleotides to about 28 nucleotides, about 28 nucleotides to about 30 nucleotides, or 11, 12, 13, 14, 15, 16, 17, 18, 19, 20, 21, 22, 23, 24, 25, 26, 27, 28, 29 or 30 nucleotides). In some embodiments, an inhibitory nucleic acid is an inhibitory RNA that targets KCNQ4. In some such embodiments, an inhibitory KCNQ4 RNA hybridizes specifically to a target on a KCNQ4. In some such embodiments, a KCNQ4 inhibitory RNA includes, e.g., an inhibitory nucleic acid is a short interfering RNA (siRNA), a short hairpin RNA (shRNA), a microRNA (miRNA), an antisense oligonucleotide, a guide RNA (gRNA), or a ribozyme. In some embodiments, hybridizing of an inhibitory KCNQ4 RNA reduces expression of a KCNQ4 gene product. Exemplary KCNQ4 inhibitory RNA sequences are provided herein.

[0064] Improve, increase, enhance, inhibit or reduce: As used herein, the terms “improve,” “increase,” “enhance,” “inhibit,” “reduce,” or grammatical equivalents thereof, indicate values that are relative to a baseline or other reference measurement. In some embodiments, a value is statistically significantly difference that a baseline or other reference measurement. In some embodiments, an appropriate reference measurement may be or comprise a measurement in a particular system (e.g., in a single individual) under otherwise comparable conditions absent presence of (e.g., prior to and/or after) a particular agent or treatment, or in presence of an appropriate comparable reference agent. In some embodiments, an appropriate reference measurement may be or comprise a measurement in comparable system known or expected to respond in a particular way, in presence of the relevant agent or treatment. In some embodiments, an appropriate reference is a negative reference; in some embodiments, an appropriate reference is a positive reference.

[0065] Knockdown: As used herein, the term “knockdown” refers to a decrease in expression of one or more gene products. In some embodiments, an inhibitory nucleic acid achieve knockdown. In some embodiments, a genome editing system described herein achieves knockdown.

[0066] Knockout: As used herein, the term “knockout” refers to ablation of expression of one or more gene products. In some embodiments, a genome editing system described herein achieve knockout.

[0067] Modulating: As used herein, the term “modulating,” means mediating a detectable increase or decrease in a level of a response in a subject compared with a level of a response in a subject in absence of a treatment or compound, and/or compared with a level of a response in an otherwise identical but untreated subject. The term encompasses perturbing and/or affecting a native signal or response thereby mediating a beneficial therapeutic response in a subject, preferably, a human.

[0068] Nuclease: As used herein, the term “nuclease” refers to an agent, for example a protein or a small molecule, capable of cleaving a phosphodiester bond connecting nucleotide residues in a nucleic acid molecule. In some embodiments, a nuclease is a protein, e.g., an enzyme that can bind a nucleic acid molecule and cleave a phosphodiester bond connecting nucleotide residues within the nucleic acid molecule. A nuclease may be an endonuclease, cleaving a phosphodiester bonds within a polynucleotide chain, or an exonuclease, cleaving a phosphodiester bond at the end of the polynucleotide chain. In some embodiments, a nuclease is a site-specific nuclease, binding and/or cleaving a specific phosphodiester bond within a specific nucleotide sequence, which is also referred to herein as the “recognition sequence,” the “nuclease target site,” or the “target site.” In some embodiments, a nuclease is a RNA-guided (i.e., RNA-programmable) nuclease, which complexes with (e.g., binds with) an RNA having a sequence that complements a target site, thereby providing the sequence specificity of a nuclease. In some embodiments, a nuclease recognizes a single stranded target site, while in other embodiments, a nuclease recognizes a double-stranded target site, for example a double-stranded DNA target site. Target sites of many naturally occurring nucleases, for example, many naturally occurring DNA restriction nucleases, are well known to those of skill in the art. In many cases, a DNA nuclease, such as EcoRI, HindIII, or BamHI, recognize a palindromic, double-stranded DNA target site of 4 to 10 base pairs in length, and cut each of the two DNA strands at a specific position within a target site. Some endonucleases cut a double-stranded nucleic acid target site symmetrically, i.e., cutting both strands at the same position so that the ends comprise base-paired nucleotides, also referred to herein as blunt ends. Other endonucleases cut a double-stranded nucleic acid target sites asymmetrically, i.e., cutting each strand at a different position so that the ends comprise unpaired nucleotides. Unpaired nucleotides at an end of a double-stranded DNA molecule are also referred to as “overhangs,” e.g., as “5′-overhang” or as “3′-overhang,” depending on whether unpaired nucleotide(s) form(s) the 5′ or the 3′ end of a given DNA strand. Double-stranded DNA molecule ends ending with unpaired nucleotide(s) are also referred to as sticky ends, as they can “stick to” other double-stranded DNA molecule ends comprising complementary unpaired nucleotide(s). A nuclease protein typically comprises a “binding domain” that mediates interaction of a protein with a nucleic acid substrate, and also, in some cases, specifically binds to a target site, and a “cleavage domain” that catalyzes the cleavage of a phosphodiester bond within a nucleic acid backbone. In some embodiments, a nuclease protein can bind and cleave a nucleic acid molecule in a monomeric form, while, in other embodiments, a nuclease protein has to dimerize or multimerize in order to cleave a target nucleic acid molecule. Binding domains and cleavage domains of naturally occurring nucleases, as well as modular binding domains and cleavage domains that can be fused to create nucleases binding specific target sites, are well known to those of skill in the art.

[0069] Nucleic acid: As used herein, the term “nucleic acid”, in its broadest sense, refers to any compound and/or substance that is or can be incorporated into an oligonucleotide chain. In some embodiments, a nucleic acid is a compound and/or substance that is or can be incorporated into an oligonucleotide chain via a phosphodiester linkage. As will be clear from context, in some embodiments, “nucleic acid” refers to an individual nucleic acid residue (e.g., a nucleotide and/or nucleoside); in some embodiments, “nucleic acid” refers to an oligonucleotide chain comprising individual nucleic acid residues. In some embodiments, a “nucleic acid” is or comprises RNA; in some embodiments, a “nucleic acid” is or comprises DNA. In some embodiments, a nucleic acid is, comprises, or consists of one or more natural nucleic acid residues. In some embodiments, a nucleic acid is, comprises, or consists of one or more nucleic acid analogs. In some embodiments, a nucleic acid analog differs from a nucleic acid in that it does not utilize a phosphodiester backbone. Alternatively or additionally, in some embodiments, a nucleic acid has one or more phosphorothioate and/or 5′-N-phosphoramidite linkages rather than phosphodiester bonds. In some embodiments, a nucleic acid is, comprises, or consists of one or more natural nucleosides (e.g., adenosine, thymidine, guanosine, cytidine, uridine, deoxyadenosine, deoxythymidine, deoxy guanosine, and deoxycytidine). In some embodiments, a nucleic acid is, comprises, or consists of one or more nucleoside analogs (e.g., 2-aminoadenosine, 2-thiothymidine, inosine, pyrrolo-pyrimidine, 3-methyl adenosine, 5-methylcytidine, C-5 propynyl-cytidine, C-5 propynyl-uridine, 2-aminoadenosine, C5-bromouridine, C5-fluorouridine, C5-iodouridine, C5-propynyl-uridine, C5-propynyl-cytidine, C5-methylcytidine, 2-aminoadenosine, 7-deazaadenosine, 7-deazaguanosine, 8-oxoadenosine, 8-oxoguanosine, 0(6)-methylguanine, 2-thiocytidine, methylated bases, intercalated bases, and combinations thereof). In some embodiments, a nucleic acid comprises one or more modified sugars (e.g., 2′-fluororibose, ribose, 2′-deoxyribose, arabinose, and hexose) as compared with those in natural nucleic acids. In some embodiments, a nucleic acid has a nucleotide sequence that encodes a functional gene product such as an RNA or protein. In some embodiments, a nucleic acid includes one or more introns. In some embodiments, nucleic acids are prepared by one or more of isolation from a natural source, enzymatic synthesis by polymerization based on a complementary template (in vivo or in vitro), reproduction in a recombinant cell or system, and chemical synthesis. In some embodiments, a nucleic acid is at least 3, 4, 5, 6, 7, 8, 9, 10, 15, 20, 25, 30, 35, 40, 45, 50, 55, 60, 65, 70, 75, 80, 85, 90, 95, 100, 1 10, 120, 130, 140, 150, 160, 170, 180, 190, 20, 225, 250, 275, 300, 325, 350, 375, 400, 425, 450, 475, 500, 600, 700, 800, 900, 1000, 1500, 2000, 2500, 3000, 3500, 4000, 4500, 5000 or more residues long. In some embodiments, a nucleic acid is partly or wholly single stranded; in some embodiments, a nucleic acid is partly or wholly double stranded. In some embodiments, a nucleic acid has a nucleotide sequence comprising at least one element that encodes, or is complementary to a sequence that encodes, a polypeptide. In some embodiments, a nucleic acid has enzymatic activity.

[0070] Operably linked: As used herein, refers to a juxtaposition wherein the components described are in a relationship permitting them to function in their intended manner. A control element “operably linked” to a functional element is associated in such a way that expression and/or activity of the functional element is achieved under conditions compatible with the control element. In some embodiments, “operably linked” control elements are contiguous (e.g., covalently linked) with coding elements of interest; in some embodiments, control elements act in trans to or otherwise at a from the functional element of interest. In some embodiments, “operably linked” refers to functional linkage between a regulatory sequence and a heterologous nucleic acid sequence resulting in expression of the latter. For example, a first nucleic acid sequence is operably linked with a second nucleic acid sequence when the first nucleic acid sequence is placed in a functional relationship with the second nucleic acid sequence. In some embodiments, for example, a functional linkage may include transcriptional control. For instance, a promoter is operably linked to a coding sequence if the promoter affects the transcription or expression of the coding sequence. Operably linked DNA sequences can be contiguous with each other and, e.g., where necessary to join two protein coding regions, are in the same reading frame.

[0071] Pharmaceutical composition: As used herein, the term “pharmaceutical composition” refers to a composition in which an active agent is formulated together with one or more pharmaceutically acceptable carriers. In some embodiments, an active agent is present in unit dose amount appropriate for administration in a therapeutic regimen that shows a statistically significant probability of achieving a predetermined therapeutic effect when administered to a relevant population. In some embodiments, a pharmaceutical composition may be specially formulated for administration in solid or liquid form, including those adapted for, e.g., administration, for example, an injectable formulation that is, e.g., an aqueous or non-aqueous solution or suspension or a liquid drop designed to be administered into an ear canal. In some embodiments, a pharmaceutical composition may be formulated for administration via injection either in a particular organ or compartment, e.g., directly into an ear, or systemic, e.g., intravenously. In some embodiments, a formulation may be or comprise drenches (aqueous or non-aqueous solutions or suspensions), tablets, boluses, powders, granules, pastes, capsules, powders, etc. In some embodiments, an active agent may be or comprise an isolated, purified, or pure compound.

[0072] Pharmaceutically acceptable: As used herein, the term “pharmaceutically acceptable” which, for example, may be used in reference to a carrier, diluent, or excipient used to formulate a pharmaceutical composition as disclosed herein, means that a carrier, diluent, or excipient is compatible with other ingredients of a composition and not deleterious to a recipient thereof.

[0073] Pharmaceutically acceptable carrier: As used herein, the term “pharmaceutically acceptable carrier” means a pharmaceutically-acceptable material, composition or vehicle, such as a liquid or solid filler, diluent, excipient, or solvent encapsulating material, involved in carrying or transporting a subject compound from one organ, or portion of a body, to another organ, or portion of a body. Each carrier must be is “acceptable” in the sense of being compatible with other ingredients of a formulation and not injurious to a patient. Some examples of materials which can serve as pharmaceutically-acceptable carriers include: sugars, such as lactose, glucose and sucrose; starches, such as corn starch and potato starch; cellulose, and its derivatives, such as sodium carboxymethyl cellulose, ethyl cellulose and cellulose acetate; powdered tragacanth; malt; gelatin; talc; excipients, such as cocoa butter and suppository waxes; oils, such as peanut oil, cottonseed oil, safflower oil, sesame oil, olive oil, corn oil and soybean oil; glycols, such as propylene glycol; polyols, such as glycerin, sorbitol, mannitol and polyethylene glycol; esters, such as ethyl oleate and ethyl laurate; agar; buffering agents, such as magnesium hydroxide and aluminum hydroxide; alginic acid; pyrogen-free water; isotonic saline; Ringer's solution; ethyl alcohol; pH buffered solutions; polyesters, polycarbonates and/or polyanhydrides; and other non-toxic compatible substances employed in pharmaceutical formulations.

[0074] Polypeptide: As used herein, the term “polypeptide” refers to any polymeric chain of residues (e.g., amino acids) that are typically linked by peptide bonds. In some embodiments, a polypeptide has an amino acid sequence that occurs in nature. In some embodiments, a polypeptide has an amino acid sequence that does not occur in nature. In some embodiments, a polypeptide has an amino acid sequence that is engineered in that it is designed and/or produced through action of the hand of man. In some embodiments, a polypeptide may comprise or consist of natural amino acids, non-natural amino acids, or both. In some embodiments, a polypeptide may include one or more pendant groups or other modifications, e.g., modifying or attached to one or more amino acid side chains, at a polypeptide's N-terminus, at a polypeptide's C-terminus, or any combination thereof. In some embodiments, such pendant groups or modifications may be acetylation, amidation, lipidation, methylation, pegylation, etc., including combinations thereof. In some embodiments, polypeptides may contain L-amino acids, D-amino acids, or both and may contain any of a variety of amino acid modifications or analogs known in the art. In some embodiments, useful modifications may be or include, e.g., terminal acetylation, amidation, methylation, etc. In some embodiments, a protein may comprise natural amino acids, non-natural amino acids, synthetic amino acids, and combinations thereof. The term “peptide” is generally used to refer to a polypeptide having a length of less than about 100 amino acids, less than about 50 amino acids, less than 20 amino acids, or less than 10 amino acids. In some embodiments, a protein is antibodies, antibody fragments, biologically active portions thereof, and/or characteristic portions thereof.

[0075] Polynucleotide: As used herein, the term “polynucleotide” refers to any polymeric chain of nucleic acids. In some embodiments, a polynucleotide is or comprises RNA; in some embodiments, a polynucleotide is or comprises DNA. In some embodiments, a polynucleotide is, comprises, or consists of one or more natural nucleic acid residues. In some embodiments, a polynucleotide is, comprises, or consists of one or more nucleic acid analogs. In some embodiments, a polynucleotide analog differs from a nucleic acid in that it does not utilize a phosphodiester backbone. Alternatively or additionally, in some embodiments, a polynucleotide has one or more phosphorothioate and/or 5′-N-phosphoramidite linkages rather than phosphodiester bonds. In some embodiments, a polynucleotide is, comprises, or consists of one or more natural nucleosides (e.g., adenosine, thymidine, guanosine, cytidine, uridine, deoxyadenosine, deoxythymidine, deoxy guanosine, and deoxycytidine). In some embodiments, a polynucleotide is, comprises, or consists of one or more nucleoside analogs (e.g., 2-aminoadenosine, 2-thiothymidine, inosine, pyrrolo-pyrimidine, 3-methyl adenosine, 5-methylcytidine, C-5 propynyl-cytidine, C-5 propynyl-uridine, 2-aminoadenosine, C5-bromouridine, C5-fluorouridine, C5-iodouridine, C5-propynyl-uridine, C5-propynyl-cytidine, C5-methylcytidine, 2-aminoadenosine, 7-deazaadenosine, 7-deazaguanosine, 8-oxoadenosine, 8-oxoguanosine, 0(6)-methylguanine, 2-thiocytidine, methylated bases, intercalated bases, and combinations thereof). In some embodiments, a polynucleotide comprises one or more modified sugars (e.g., 2′-fluororibose, ribose, 2′-deoxyribose, arabinose, and hexose) as compared with those in natural nucleic acids. In some embodiments, a polynucleotide has a nucleotide sequence that encodes a functional gene product such as an RNA or protein. In some embodiments, a polynucleotide includes one or more introns. In some embodiments, a polynucleotide is prepared by one or more of isolation from a natural source, enzymatic synthesis by polymerization based on a complementary template (in vivo or in vitro), reproduction in a recombinant cell or system, and chemical synthesis. In some embodiments, a polynucleotide is at least 3, 4, 5, 6, 7, 8, 9, 10, 15, 20, 25, 30, 35, 40, 45, 50, 55, 60, 65, 70, 75, 80, 85, 90, 95, 100, 1 10, 120, 130, 140, 150, 160, 170, 180, 190, 20, 225, 250, 275, 300, 325, 350, 375, 400, 425, 450, 475, 500, 600, 700, 800, 900, 1000, 1500, 2000, 2500, 3000, 3500, 4000, 4500, 5000 or more residues long. In some embodiments, a polynucleotide is partly or wholly single stranded; in some embodiments, a polynucleotide is partly or wholly double stranded. In some embodiments, a polynucleotide has a nucleotide sequence comprising at least one element that encodes, or is the complement of a sequence that encodes, a polypeptide. In some embodiments, a polynucleotide has enzymatic activity.

[0076] Protein: As used herein, the term “protein” refers to a polypeptide (i.e., a string of at least two amino acids linked to one another by peptide bonds). Proteins may include moieties other than amino acids (e.g., may be glycoproteins, proteoglycans, etc.) and/or may be otherwise processed or modified. Those of ordinary skill in the art will appreciate that a “protein” can be a complete polypeptide chain as produced by a cell (with or without a signal sequence), or can be a characteristic portion thereof. Those of ordinary skill will appreciate that a protein can sometimes include more than one polypeptide chain, for example linked by one or more disulfide bonds or associated by other means.

[0077] Recombinant: As used herein, the term “recombinant” is intended to refer to polypeptides that are designed, engineered, prepared, expressed, created, manufactured, and/or or isolated by recombinant means, such as polypeptides expressed using a recombinant expression construct transfected into a host cell; polypeptides isolated from a recombinant, combinatorial human polypeptide library; polypeptides isolated from an animal (e.g., a mouse, rabbit, sheep, fish, etc.) that is transgenic for or otherwise has been manipulated to express a gene or genes, or gene components that encode and/or direct expression of the polypeptide or one or more component(s), portion(s), element(s), or domain(s) thereof; and/or polypeptides prepared, expressed, created or isolated by any other means that involves splicing or ligating selected nucleic acid sequence elements to one another, chemically synthesizing selected sequence elements, and/or otherwise generating a nucleic acid that encodes and/or directs expression of a polypeptide or one or more component(s), portion(s), element(s), or domain(s) thereof. In some embodiments, one or more of such selected sequence elements is found in nature. In some embodiments, one or more of such selected sequence elements is designed in silico. In some embodiments, one or more such selected sequence elements results from mutagenesis (e.g., in vivo or in vitro) of a known sequence element, e.g., from a natural or synthetic source such as, for example, in the germline of a source organism of interest (e.g., of a human, a mouse, etc.).

[0078] Reference: As used herein, the term “reference” describes a standard or control relative to which a comparison is performed. For example, in some embodiments, an agent, animal, individual, population, sample, sequence or value of interest is compared with a reference or control agent, animal, individual, population, sample, sequence or value. In some embodiments, a reference or control is tested and/or determined substantially simultaneously with the testing or determination of interest. In some embodiments, a reference or control is a historical reference or control, optionally embodied in a tangible medium. Typically, as would be understood by those skilled in the art, a reference or control is determined or characterized under comparable conditions or circumstances to those under assessment. Those skilled in the art will appreciate when sufficient similarities are present to justify reliance on and/or comparison to a particular possible reference or control. In some embodiments, a reference is a negative control reference; in some embodiments, a reference is a positive control reference.

[0079] Regulatory Element: As used herein, the term “regulatory element” or “regulatory sequence” refers to non-coding regions of DNA that regulate, in some way, expression of one or more particular genes. In some embodiments, such genes are apposed or “in the neighborhood” of a given regulatory element. In some embodiments, such genes are located quite far from a given regulatory element. In some embodiments, a regulatory element impairs or enhances transcription of one or more genes. In some embodiments, a regulatory element may be located in cis to a gene being regulated. In some embodiments, a regulatory element may be located in trans to a gene being regulated. For example, in some embodiments, a regulatory sequence refers to a nucleic acid sequence which is regulates expression of a gene product operably linked to a regulatory sequence. In some such embodiments, this sequence may be an enhancer sequence and other regulatory elements which regulate expression of a gene product.

[0080] Sample: As used herein, the term “sample” typically refers to an aliquot of material obtained or derived from a source of interest. In some embodiments, a source of interest is a biological or environmental source. In some embodiments, a source of interest may be or comprise a cell or an organism, such as a microbe (e.g., virus), a plant, or an animal (e.g., a human). In some embodiments, a source of interest is or comprises biological tissue or fluid. In some embodiments, a biological tissue or fluid may be or comprise amniotic fluid, aqueous humor, ascites, bile, bone marrow, blood, breast milk, cerebrospinal fluid, cerumen, chyle, chime, ejaculate, endolymph, exudate, feces, gastric acid, gastric juice, lymph, mucus, pericardial fluid, perilymph, peritoneal fluid, pleural fluid, pus, rheum, saliva, sebum, semen, serum, smegma, sputum, synovial fluid, sweat, tears, urine, vaginal secretions, vitreous humour, vomit, and/or combinations or component(s) thereof. In some embodiments, a biological fluid may be or comprise an intracellular fluid, an extracellular fluid, an intravascular fluid (blood plasma), an interstitial fluid, a lymphatic fluid, and/or a transcellular fluid. In some embodiments, a biological fluid may be or comprise a plant exudate. In some embodiments, a biological tissue or sample may be obtained, for example, by aspirate, biopsy (e.g., fine needle or tissue biopsy), swab (e.g., oral, nasal, skin, or vaginal swab), scraping, surgery, washing or lavage (e.g., bronchioalveolar, ductal, nasal, ocular, oral, uterine, vaginal, or other washing or lavage). In some embodiments, a biological sample is or comprises cells obtained from an individual. In some embodiments, a sample is a “primary sample” obtained directly from a source of interest by any appropriate means. In some embodiments, as will be clear from context, the term “sample” refers to a preparation that is obtained by processing (e.g., by removing one or more components of and/or by adding one or more agents to) a primary sample. For example, filtering using a semi-permeable membrane. Such a “processed sample” may comprise, for example nucleic acids or proteins extracted from a sample or obtained by subjecting a primary sample to one or more techniques such as amplification or reverse transcription of nucleic acid, isolation and/or purification of certain components, etc.

[0081] Subject: As used herein, the term “subject” refers an organism, typically a mammal (e.g., a human, in some embodiments including prenatal human forms). In some embodiments, a subject is suffering from a relevant disease, disorder or condition. In some embodiments, a subject is susceptible to a disease, disorder, or condition. In some embodiments, a subject displays one or more symptoms or characteristics of a disease, disorder or condition. In some embodiments, a subject does not display any symptom or characteristic of a disease, disorder, or condition. In some embodiments, a subject is someone with one or more features characteristic of susceptibility to or risk of a disease, disorder, or condition. In some embodiments, a subject is a patient. In some embodiments, a subject is an individual to whom diagnosis and/or therapy is and/or has been administered.

[0082] Substantially: As used herein, the term “substantially” refers to a qualitative condition of exhibiting total or near-total extent or degree of a characteristic or property of interest. One of ordinary skill in the art will understand that biological and chemical phenomena rarely, if ever, go to completion and/or proceed to completeness or achieve or avoid an absolute result. The term “substantially” is therefore used herein to capture a potential lack of completeness inherent in many biological and chemical phenomena.

[0083] Target site: As used herein, the term “target site” means a portion of a nucleic acid to which a binding molecule, e.g., a microRNA, an siRNA, a guide RNA (“gRNA”) or a guide RNA:Cas complex, will bind, provided sufficient conditions for binding exist. In some embodiments, a nucleic acid comprising a target site is double stranded. In some embodiments, a nucleic acid comprising a target site is single stranded. Typically, a target site comprises a nucleic acid sequence to which a binding molecule, e.g., a gRNA or a gRNA:Cas complex described herein, binds and/or that is cleaved as a result of such binding. In some embodiments, a target site comprises a nucleic acid sequence (also referred to herein as a target sequence or protospacer) that is complementary to a DNA sequence to which the targeting sequence (also referred to herein as the spacer) of a gRNA described herein binds. In some embodiments in the context of RNA-guided nucleases, e.g., CRISPR/Cas nucleases, a target site typically comprises a nucleotide sequence (also referred to herein as a target sequence or a protospacer) that is complementary to a sequence comprised in a gRNA (also referred to herein as the targeting sequence or the spacer) of an RNA-programmable nuclease. In some such embodiments, a target site further comprises a protospacer adjacent motif (PAM) at the 3′ end or 5′ end adjacent to the gRNA-complementary sequence. For an RNA-guided nuclease Cas9, a target sequence may be, in some embodiments, 16-24 base pairs plus a 3-6 base pair PAM (e.g., NNN, wherein N represents any nucleotide). Exemplary PAM sequences for RNA-guided nucleases, such as Cas9, are known to those of skill in the art and include, without limitation, NNG, NGN, NAG, NGA, NGG, NGAG and NGCG wherein N represents any nucleotide. In addition, Cas9 nucleases from different species have been described, e.g., S. thermophilus recognizes a PAM that comprises the sequence NGGNG, and Cas9 from S. aureus recognizes a PAM that comprises the sequence NNGRRT. In some embodiments, Cas9 from S. aureus recognizes a PAM that comprises the sequence NNNRRT. Additional PAM sequences are known in the art, including, but not limited to NNAGAAW and NAAR (see, e.g., Esvelt and Wang, Molecular Systems Biology, 9:641 (2013), the entire content of which is incorporated herein by reference). For example, the target site of an RNA-guided nuclease, such as, e.g., Cas9, may comprise a structure [Nz]-[PAM], where each N is, independently, any nucleotide, and z is an integer between 1 and 50. In some embodiments, z is at least 2, at least 3, at least 4, at least 5, at least 6, at least 7, at least 8, at least 9, at least 10, at least 11, at least 12, at least 13, at least 14, at least 15, at least 16, at least 17, at least 18, at least 19, at least 20, at least 25, at least 30, at least 35, at least 40, at least 45, or at least 50. In some embodiments, z is 5, 6, 7, 8, 9, 10, 11, 12, 13, 14, 15, 16, 17, 18, 19, 20, 21, 22, 23, 24, 25, 26, 27, 28, 29, 30, 31, 32, 33, 34, 35, 36, 37, 38, 39, 40, 41, 42, 43, 44, 45, 46, 47, 48, 49, or 50. In some embodiments, Z is 20.

[0084] Treatment: As used herein, the term “treatment” (also “treat” or “treating”) refers to any administration of a therapy that partially or completely alleviates, ameliorates, eliminates, reverses, relieves, inhibits, delays onset of, reduces severity of, and/or reduces incidence of one or more symptoms, features, and/or causes of a particular disease, disorder, and/or condition. In some embodiments, such treatment may be of a subject who does not exhibit signs of the relevant disease, disorder and/or condition and/or of a subject who exhibits only early signs of the disease, disorder, and/or condition. Alternatively, or additionally, such treatment may be of a subject who exhibits one or more established signs of the relevant disease, disorder and/or condition. In some embodiments, treatment may be of a subject who has been diagnosed as suffering from the relevant disease, disorder, and/or condition. In some embodiments, treatment may be of a subject known to have one or more susceptibility factors that are statistically correlated with increased risk of development of a given disease, disorder, and/or condition.

[0085] Variant: As used herein, the term “variant” refers to a version of something, e.g., a gene sequence, that is different, in some way, from another version. To determine if something is a variant, a reference version is typically chosen and a variant is different relative to that reference version. In some embodiments, a variant can have the same or a different (e.g., increased or decreased) level of activity or functionality than a wild type sequence. For example, in some embodiments, a variant can have improved functionality as compared to a wild-type sequence if it is, e.g., codon-optimized to resist degradation, e.g., by an inhibitory nucleic acid, e.g., miRNA. Such a variant is referred to herein as a gain-of-function variant. In some embodiments, a variant has a reduction or elimination in activity or functionality or a change in activity that results in a negative outcome (e.g., increased electrical activity resulting in chronic depolarization that leads to cell death). Such a variant is referred to herein as a loss-of-function variant. For example, in some embodiments, a KCNQ4 gene sequence is a wild-type sequence, which encodes a functional protein and exists in a majority of members of species with genomes containing the KCNQ4 gene. In some such embodiments, a gain-of-function variant can be a gene sequence of KCNQ4 that contains one or more nucleotide differences relative to a wild-type KCNQ4 gene sequence. In some embodiments, a gain-of-function variant is a codon-optimized sequence which encodes a transcript or polypeptide that may have improved properties (e.g., less susceptibility to degradation, e.g., less susceptibility to miRNA mediated degradation) than its corresponding wild type(e.g., non-codon optimized) version. In some embodiments, a loss-of-function variant has one or more changes that result in a transcript or polypeptide that is defective in some way (e.g., decreased function, non-functioning) relative to the wild type transcript and/or polypeptide. For example, in some embodiments, a mutation in a KCNQ4 sequence results in a non-functional or otherwise defective KCNQ4 protein, which impairs or prevents function of a KCNQ4-containing potassium channel in ear outer hair cells. In some such embodiments, such loss-of-function variant KCNQ4-containing channels result in chronic depolarization of outer hair cells and, consequently, cell death.

### BRIEF DESCRIPTION OF THE DRAWING

[0086] FIG. 1 shows overall schematic of exons in a KCNQ4 gene and lists certain exemplary mutations known to result in hearing loss.

[0087] FIG. 2 shows an exemplary inhibitory RNA knockdown strategy using at least one construct, in accordance with an embodiment of the present disclosure.

[0088] FIG. 3 shows levels of expression of KCNQ4 in HEK293 cells with or without treatment with exemplary shRNA-mediated knockdown.

[0089] FIG. 4 shows exemplary shRNA and miRNA constructs for KCNQ4 knockdown.

[0090] FIG. 5 shows exemplary designs of eight miRNA targeting constructs for inhibiting KCNQ4 expression.

[0091] FIG. 6 depicts a schematic that displays exemplary miRNA constructs for choosing miRNAs targeting sequences expressed within a variety of compartments within the ear.

[0092] FIG. 7 shows a schematic of exemplary miR constructs and reporter system for KCNQ4 knockdown, in accordance with an embodiment of the present disclosure. In this reporter system, if an miRNA binds to KCNQ4-mScarlet mRNA, cleavage of the mRNA occurs and no detectable signal (mScarlet) is produced by the reporter, demonstrating effective KCNQ4 knockdown. By contrast, if an miRNA does not bind to KCNQ4-mScarlet mRNA, no cleavage occurs and a detectable signal (mScarlet) produced, demonstrating KCNQ4 expression (i.e., no knockdown).

[0093] FIG. 8 shows an exemplary miR mediated knockdown (miR1-155), using a luciferase reporter assay in accordance with an embodiment of the present disclosure. FIG. 8 discloses SEQ ID NOS 292-296, respectively, in order of appearance.

[0094] FIG. 9 shows an exemplary CRISPR-based construct and reporter system for KCNQ4 knockdown, in accordance with an embodiment of the present disclosure.

[0095] FIG. 10 shows levels of expression of KCNQ4 in HEK cells after CRISPR-mediated knockdown (N=3 biological replicates).

[0096] FIG. 11 shows results from an exemplary assay measuring levels of mRNA expression of KCNQ4 in HEK cells after shRNA-mediated knockdown (N=3 biological replicates per condition).

[0097] FIG. 12 shows results from an exemplary assay measuring levels of mRNA expression of KCNQ4 in HEK cells after shRNA-mediated knockdown (N=3 biological replicates per condition).

[0098] FIG. 13 shows an exemplary miR-based construct, reporter system and assay for KCNQ4 knockdown, in accordance with an embodiment of the present disclosure.

[0099] FIGS. 14A-14B show results obtained when exemplary scaffolds and targeting sequences were evaluated and level of KCNQ4 was assessed after evaluation.

[0100] FIG. 15 shows results obtained when exemplary scaffolds and targeting sequences were used and KCNQ4 levels were assessed.

[0101] FIG. 16 shows results obtained when exemplary scaffolds and targeting sequences were evaluated using an exemplary off-target reporter assay.

[0102] FIG. 17 shows results obtained when exemplary scaffolds and targeting sequences were evaluated using an exemplary passenger reporter assay.

[0103] FIG. 18 shows results obtained when exemplary scaffolds and targeting sequences were used and KCNQ4 levels were assessed.

[0104] FIG. 19 shows results obtained when exemplary scaffolds and targeting sequences were used and KCNQ4 levels were assessed.

[0105] FIG. 20 shows results obtained when exemplary scaffolds and targeting sequences were used and KCNQ4 levels were assessed.

[0106] FIG. 21 shows in vitro knockdown of KCNQ4 by exemplary scaffolds and targeting sequences described herein.

[0107] FIG. 22 shows an image depicting a western blot to assess in vitro knockdown of KCNQ4 using exemplary scaffolds and targeting sequences described herein.

[0108] FIG. 23 shows in vitro knockdown of KCNQ4 by exemplary scaffolds and targeting sequences described herein.

[0109] FIG. 24 shows an image depicting a western blot to assess in vitro knockdown of KCNQ4 using exemplary scaffolds and targeting sequences described herein.

[0110] FIG. 25 shows results obtained when exemplary scaffolds and targeting sequences were evaluated and level of KCNQ4 was assessed after evaluation.

[0111] FIG. 26 shows images of HEK cells transduced with an exemplary AAVAnc80-CAG.EGFP construct at three MOIs.

[0112] FIG. 27 shows results obtained when exemplary scaffolds and targeting sequences were used and KCNQ4 channel conductance levels were assessed.

[0113] FIG. 28 shows an image depicting a western blot to assess in vitro knockdown of KCNQ4 using exemplary scaffolds and targeting sequences described herein.

[0114] FIGS. 29A-29B is a schematic representation of an administration method as described herein. FIG. 29A includes an image of a delivery device as described herein. A delivery device as shown is intended for intracochlear administration of injected fluid through the round window membrane, with a stopper (green) to guide insertion depth. FIG. 29B includes an images showing an expected flow of injected fluid through scala tympani to scala vestibuli (via communication at the helicotrema at the cochlear apex) and then out of the cochlea through a vent placed in the stapes footplate of a delivery device within the oval window (Talei 2019, which is incorporated herein in its entirety by reference).

[0115] FIG. 30 depicts seven miRNA targeting constructs for inhibiting KCNQ4 expression that can be used in accordance with the present disclosure.

[0116] FIG. 31 depicts off-targets of seven miRNA targeting constructs for inhibiting KCNQ4 expression that can be used in accordance with the present disclosure.

[0117] FIG. 32 illustrates a perspective of a device for delivering fluid to an inner ear, according to aspects of the present disclosure.

[0118] FIG. 33 illustrates a sideview of a bent needle sub-assembly, according to aspects of the present disclosure.

[0119] FIG. 34 illustrates a perspective view of a device for delivering fluid to an inner ear, according to aspects of the present disclosure.

[0120] FIG. 35 illustrates a perspective view of a bent needle sub-assembly coupled to the distal end of a device, according to aspects of the present disclosure.

### DETAILED DESCRIPTION OF CERTAIN EMBODIMENTS

### 1. Hearing Loss

[0121] Generally, an ear can be described as including: an outer ear, middle ear, inner ear, hearing (acoustic) nerve, and auditory system (which processes sound as it travels from the ear to the brain). In addition to detecting sound, ears also help to maintain balance. Thus, in some embodiments, inner ear disorders can cause hearing loss, tinnitus, vertigo, imbalance, or combinations thereof.

[0122] Hearing loss can be a result of genetic factors, environmental factors, or a combination of genetic and environmental factors. About half of all people who have tinnitus-phantom noises in their auditory system (ringing, buzzing, chirping, humming, or beating)—also have an over-sensitivity to/reduced tolerance for certain sound frequency and volume ranges, known as hyperacusis (also spelled hyperacousis). A variety of nonsyndromic and syndromic-related hearing losses will be known to those of skill in the art (e.g., DFNB4, and Pendred syndrome, respectively). Environmental causes of hearing impairment or loss may include, e.g., certain medications, specific infections before or after birth, and/or exposure to loud noise over an extended period. In some embodiments, hearing loss can result from noise, ototoxic agents, presbyacusis, disease, infection or cancers that affect specific parts of an ear. In some embodiments, ischemic damage can cause hearing loss via pathophysiological mechanisms. In some embodiments, intrinsic abnormalities, like congenital mutations to genes that play an important role in cochlear anatomy or physiology, or genetic or anatomical changes in supporting and/or hair cells can be responsible for or contribute to hearing loss.

[0123] Hearing loss and/or deafness is one of the most common human sensory deficits, and can occur for many reasons. In some embodiments, a subject may be born with hearing loss or without hearing, while others may lose hearing slowly over time. Approximately 36 million American adults report some degree of hearing loss, and one in three people older than 60 and half of those older than 85 experience hearing loss. Approximately 1.5 in 1,000 children are born with profound hearing loss, and another two to three per 1,000 children are born with partial hearing loss (Smith et al., 2005, Lancet 365:879-890, which is incorporated in its entirety herein by reference). More than half of these cases are attributed to a genetic basis (Di Domenico, et al., 2011, J. Cell. Physiol. 226:2494-2499, which is incorporated in its entirety herein by reference).

[0124] Treatments for hearing loss currently consist of hearing amplification for mild to severe losses and cochlear implantation for severe to profound losses (Kral and O'Donoghue, 2010, N. Engl. J. Med. 363:1438-1450, which is incorporated in its entirety herein by reference). Recent research in this arena has focused on cochlear hair cell regeneration, applicable to the most common forms of hearing loss, including presbycusis, noise damage, infection, and ototoxicity. There remains a need for effective treatments, such as gene therapy, which can repair and/or mitigate a source of a hearing problem.

[0125] In some embodiments, nonsyndromic hearing loss and/or deafness is not associated with other signs and symptoms. In some embodiments, syndromic hearing loss and/or deafness occurs in conjunction with abnormalities in other body parts. Approximately 70 percent to 80 percent of genetic hearing loss and/or deafness cases are nonsyndromic; remaining cases are often caused by specific genetic syndromes. Nonsyndromic deafness and/or hearing loss can have different patterns of inheritance, and can occur at any age. Types of nonsyndromic deafness and/or hearing loss are generally named according to their inheritance patterns. For example, autosomal dominant forms are designated DFNA, autosomal recessive forms are DFNB, and X-linked forms are DFN. Each type is also numbered in the order in which it was first described. For example, DFNA1 was the first described autosomal dominant type of nonsyndromic deafness.

[0126] Between 75 percent and 80 percent of genetically causative hearing loss and/or deafness cases are inherited in an autosomal recessive pattern, which means both copies of a gene in each cell have mutations. Usually, each parent of an individual with autosomal recessive hearing loss and/or deafness is a carrier of one copy of the mutated gene, but is not affected by this form of hearing loss. Another 20 percent to 25 percent of nonsyndromic hearing loss and/or deafness cases are autosomal dominant, which means one copy of the altered gene in each cell is sufficient to result in deafness and/or hearing loss. People with autosomal dominant deafness and/or hearing loss most often inherit an altered copy of the gene from a parent who is deaf and/or has hearing loss. Between one to two percent of cases of deafness and/or hearing loss show an X-linked pattern of inheritance, which means a mutated gene responsible for a condition is located on an X chromosome (one of the two sex chromosomes). Males with X-linked nonsyndromic hearing loss and/or deafness tend to develop more severe hearing loss earlier in life than females who inherit a copy of the same gene mutation. A characteristic of X-linked inheritance is that fathers cannot pass X-linked traits to their sons.

[0127] Mitochondrial nonsyndromic deafness, which results from changes to mitochondrial DNA, occurs in less than one percent of cases in the United States. Altered mitochondrial DNA is passed from a mother to all of her sons and daughters. This type of deafness is not inherited from fathers. The causes of syndromic and nonsyndromic deafness and/or hearing loss are complex. Researchers have identified more than 30 genes that, when altered, are associated with syndromic and/or nonsyndromic deafness and/or hearing loss; however, some of these genes have not been fully characterized. Different mutations in a given gene can be associated with different types of deafness and/or hearing loss, and some genes are associated with both syndromic and nonsyndromic deafness and/or hearing loss.

[0128] In some embodiments, deafness and/or hearing loss can be conductive (arising from the ear canal or middle ear), sensorineural (arising from the inner ear or auditory nerve), or mixed. In some embodiments, nonsyndromic deafness and/or hearing loss is associated with permanent hearing loss caused by damage to inner ear structures (sensorineural deafness). In some embodiments, sensorineural hearing loss can be due to poor hair cell function. In some embodiments, sensorineural hearing impairments involve the eighth cranial nerve (the vestibulocochlear nerve) or auditory brain regions. In some such embodiments, only auditory centers of a brain are affected. In such a situation, cortical deafness may occur, where sounds may be heard at normal thresholds, but quality of sound perceived is so poor that speech cannot be understood.

[0129] Hearing loss that results from middle ear changes is called conductive hearing loss. Some forms of nonsyndromic deafness and/or hearing loss involve changes in both inner and middle ear regions, called mixed hearing loss. Hearing loss and/or deafness that is present before a child learns to speak can be classified as prelingual or congenital. Hearing loss and/or deafness that occurs after development of speech can be classified as postlingual. Most autosomal recessive loci related to syndromic or nonsyndromic hearing loss cause prelingual severe-to-profound hearing loss.

[0130] As is known to those of skill in the art, hair cells are sensory receptors for both auditory and vestibular systems of vertebrate ears. Hair cells detect movement in their environments and, in mammals, hair cells are located within the cochlea of the ear, in the organ of Corti. Mammalian ears are known to have two types of hair cells—inner hair cells and outer hair cells. In some embodiments, outer hair cells amplify low level sound frequencies, either through mechanical movement of hair cell bundles or electrically-driven movement of hair cell soma. In some embodiments, inner hair cells transform vibrations in cochlear fluid into electrical signals that the auditory nerve transmits to the brain. In some embodiments, hair cells may be abnormal at birth, or damaged during the lifetime of an individual. In some embodiments, outer hair cells may be able to regenerate. In some embodiments, inner hair cells are not capable of regeneration after illness or injury. In some embodiments, sensorineural hearing loss is due to abnormalities in hair cells.

[0131] As is known to those of skill in the art, hair cells do not occur in isolation, and their function is supported by a wide variety of cells which can collectively be referred to as supporting cells. Supporting cells may fulfill numerous functions, and include a number of cell types, including but not limited to Hensen's cells, Deiters' cells, pillar cells, Claudius cells, inner phalangeal cells, and border cells. In some embodiments, sensorineural hearing loss is due to abnormalities in supporting cells. In some embodiments, supporting cells may be abnormal at birth, or damaged during the lifetime of an individual. In some embodiments, supporting cells may be able to regenerate. In some embodiments, certain supporting cells may not be capable of regeneration.

### 2. KCNQ4 and Hearing Loss

[0132] Typically, a human KCNQ4 gene has 4324 nucleic acid bases and encodes a 695 amino acid protein, with a predicted mass of approximately 77 kDa. A human KCNQ4 gene has 14 exons and located on chromosome 1. A KCNQ4 gene encodes a Kv7.4, a voltage-gated potassium channel subunit that forms a homotetrameric potassium channel. In other words, four KCNQ4 protein subunits form a single, voltage-gated potassium channel (Naito et al., 2013, which is incorporated herein by reference in its entirety). In some embodiments, a KCNQ4 protein (Kv7.4) may be part of a heteromeric channel, i.e., a heterotetrameric potassium channel comprising Kv7.4 and other KCNQ proteins, e.g., KCNQ3.

[0133] In some embodiments, one or more mutations in a KCNQ4 gene product may be associated with hearing loss. In some embodiments, distortion product optoacoustic emissions (DPOAEs) are absent in individuals affected by KCNQ4-mediated hearing loss.

[0134] Voltage-gated potassium channel subunit Kv7.4 is a protein encoded by aKCNQ4 gene and is normally most highly expressed in outer hair cells of the ear. As is known to those of skill in the art, OHCs are non-regenerative cells. Kv7.4 channels help maintain resting potential in ear hair cells. For example, Kv7.4 is expressed in bases of hair cells that help maintain hair cell resting potential (Kharkovets et al., 2006, which is incorporated in its entirety herein by reference) and in some embodiments, is expressed at approximately 8-fold higher in OHCs than IHCs.

[0135] Without being bound by any particular theory, the present disclosure contemplates that, either in addition or as an alternative to gene therapy that treats OHCs, gene therapy may be used to treat IHCs. KCNQ4 is typically expressed at low levels in IHCs (e.g., relative to OHCs) and, in some embodiments, gene therapy that impacts expression of KCNQ4 in IHCs may improve function of K+ channels. In some such embodiments, when gene therapy is used to treat IHCs instead of or in addition to OHCs in a subject in need thereof, channel conduction and/or hearing may improve.

[0136] In some embodiments, defects or changes in ion channels are associated with deafness. For example, in some embodiments, a change in a gene product of an ion channel, e.g., a Kv7.4 channel, may impact its function. In some embodiments, for example, one or more mutations in a KCNQ4 gene product can result in a non-functional or less functional ion channels as compared to ion channels comprises of subunits encoded by genes without one or more mutations. In some such embodiments, where one or more variations exists in KCNQ4 (e.g., relative to a wild-type sequence), for example, a resultant loss-of-function Kv7.4 protein variant can result in a non-functional or less functional channel. For example, in some embodiments, a loss-of-function Kv7.4 variant is or is part of an ion channel that antagonizes potassium currents. In some such embodiments, OHCs are chronically depolarized and eventually die (Jung et al., 2018, which is incorporated in its entirety herein by reference). In some embodiments, changes in one or more gene products of KCNQ4 is/are associated with hearing loss.

[0137] In some embodiments, KCNQ4-mediated hearing loss is DFNA2. DFNA2 is nonsyndromic hearing loss inherited as an autosomal dominant mutation in a genomic sequence of KCNQ4 (which, in turn, impacts function of Kv7.4 in hair cells). DFNA2 nonsyndromic hearing loss, in some embodiments, manifests as sensorineural post-lingual hearing impairment that is progressive and symmetric; generally, no vestibular impairment is present. In some such embodiments, hearing loss is symmetric, predominantly high-frequency sensorineural hearing loss (SNHL). In some such embodiments, hearing loss is progressive or eventually progresses across all frequencies.

[0138] Without wishing to be bound by any particular theory, in KCNQ4-related hearing loss, at younger ages, hearing loss tends to be mild for low frequency sounds and moderate for high frequency sounds. At older ages, hearing loss tends to moderate for low frequency sounds and severe to profound for high frequency sounds. Hearing loss tends to be present at high frequency sounds at all ages, likely present from birth. In some embodiments, patients with a KCNQ4 mutation experience hearing loss that requires a hearing aid between approximately ten to forty years of age, and experience severe-to-profound loss across all hearing frequencies by approximately seventy years of age (see, e.g., Table 1 for an exemplary set of range characterizations of hearing threshold vs severity of hearing loss)

TABLE 1

| Severity | Threshold (dB) | |
|---|---|---|
| Mild | 26-40 | dB |
| Moderate | 41-55 | dB |
| Moderately-severe | 56-70 | dB |
| Severe | 71-90 | dB |
| Profound | 90 | dB |

[0139] Without being bound by any particular theory, the present disclosure contemplates technologies including gene therapy may be beneficial in one or more instances of a loss-of-function KCNQ4 variant. For example, in some embodiments, gene therapy includes administering a gain-of-function KCNQ4 variant (e.g., wild type, e.g., gain-of-function KCNQ4) that restores function, e.g., Kv7.4 channel function. In some embodiments, a gain-of-function KCNQ4 gene product (e.g., a wild type gene product, e.g., a codon-optimized gene product) is administered to a subject in need thereof.

[0140] In some embodiments, gene therapy includes suppressing one or more gene products associated with a loss-of-function KCNQ4 variant In some such embodiments, suppression of a loss-of-function KCNQ4 variant may help to restore or prevent hearing loss. For example, without being bound by any particular theory, it is contemplated that, in some embodiments, a loss-of-function KCNQ4 variant gene product encodes a loss-of-function Kv7.4 variant. In some such embodiments, it is contemplated that such a loss-of-function Kv7.4 variant needs to be suppressed. In some embodiments, suppression alleviates toxicity or damage caused by a buildup of loss-of-function Kv7.4 variant protein. In some embodiments, a loss-of-function KCNQ4 variant gene product (e.g., Kv7.4 variant protein) is suppressed using gene therapy.

[0141] In some embodiments, gene therapy is administered to suppress a loss-of-function KCNQ4 variant and/or to express a gain-of-function KCNQ4 gene product (e.g., a wild type gene product, e.g., a codon optimized gene product). In some such embodiments, suppression and/or replacement of one or more KCNQ4 gene products mitigates, attenuates, or restores hearing loss in a subject. For example, the present disclosure recognizes that, in some embodiments, suppression of a loss-of-function KCNQ4 gene product variant (e.g., mRNA, e.g., protein) is desirable. In some such embodiments, suppression of a loss-of-function KCNQ4 gene product variant may occur alone, concomitant with, or subsequent to expression of a gain-of-function KCNQ4 gene product (e.g., functional Kv7.4 protein, e.g., functional ion channels that do not result in chronic depolarization and cell damage or death).

[0142] In some embodiments, suppression and/or replacement is accomplished using a single construct, or more than one construct (e.g., one construct comprising components to achieve suppression of a loss-of-function KCNQ4 variant gene product and another construct comprising components to achieve expression of a gain-of-function KCNQ4 gene product).

### 3. Compositions

[0143] Among other things, the present disclosure provides compositions. In some embodiments, a composition comprises a construct as described herein. In some embodiments, a composition comprises one or more constructs as described herein. In some embodiments, a composition comprises a plurality of constructs as described herein. In some embodiments, when more than one construct is included in the composition, the constructs are different from one another.

[0144] In some embodiments, a composition comprises a polynucleotide encoding a KCNQ4 protein or characteristic portion thereof. In some embodiments, a composition comprises a polynucleotide encoding an inhibitory molecule, e.g., an miRNA, etc. In some embodiments, a composition comprises at least one polynucleotide encoding a KCNQ4 protein or characteristic portion thereof and at least one polynucleotide encoding an inhibitory molecule, e.g., an miRNA.

[0145] In some embodiments, a composition comprises an AAV particle as described herein. In some embodiments, a composition comprises one or more AAV particles as described herein. In some embodiments, a composition comprises a plurality of AAV particles. In come embodiments, when more than one type of AAV particle is included in a composition, the more than one type of AAV particles are each different types of particles.

[0146] In some embodiments, a composition comprises a cell.

[0147] In some embodiments, a composition is or comprises a pharmaceutical composition.

a. KCNQ4 Polynucleotides

[0148] Among other things, the present disclosure provides polynucleotides, e.g., polynucleotides comprising a KCNQ gene or characteristic portion thereof, as well as compositions comprising inhibitory molecules, e.g., inhibitory to target site of KCNQ4 genes or characteristics thereof, e.g., miRNA, etc. The present disclosure also provides methods utilizing such polynucleotides and/or compositions.

[0149] In some embodiments, a polynucleotide of the present disclosure may be or comprise DNA or RNA. In some embodiments, DNA can be genomic DNA or cDNA. In some embodiments, RNA can be an mRNA, an miRNA, an shRNA/siRNA, a gRNA, etc.

[0150] In some embodiments, a polynucleotide comprises exons and/or introns of a KCNQ4 gene.

[0151] In some embodiments, a gene product is expressed from a polynucleotide comprising a KCNQ4 gene or characteristic portion thereof. In some embodiments, expression of such a polynucleotide can utilize one or more control elements (e.g., promoters, enhancers, splice sites, polyadenylation sites, translation initiation sites, etc.). Thus, in some embodiments, a polynucleotide provided herein can comprise one or more control elements.

[0152] In some embodiments, a KCNQ4 gene is a mammalian KCNQ4 gene. In some embodiments, a KCNQ4 gene is a murine KCNQ4 gene. An exemplary murine KCNQ4 cDNA sequence is or includes the sequence of SEQ ID NO: 91. In some embodiments, a KCNQ4 gene is a primate KCNQ4 gene. In some embodiments, a KCNQ4 gene is a human KCNQ4 gene. An exemplary human KCNQ4 cDNA sequence is or includes the sequence of SEQ ID NO: 2. An exemplary human KCNQ4 cDNA sequence is or includes the sequence of SEQ ID NO: 90. An exemplary human KCNQ4 genomic DNA sequence can be found in SEQ ID NO: 5. Exemplary human KCNQ4 cDNA sequences including untranslated regions is or includes the sequence of SEQ ID NOs: 6, 7, or 8. An exemplary human KCNQ4 RNA sequence can be found in, e.g., SEQ ID NO: 1. Exemplary human codon-optimized KCNA4 sequences (e.g., optimized to resist gRNA binding and/or miRNA degradation) can be found in, e.g., SEQ ID NOs: 9 or 10.

[0153] For example, in some embodiments, the present disclosure describes exemplary constructs that have been codon-optimized (e.g., Exemplary pITR-CMV.hKCNQ4codop_v2.mScarlet, SEQ ID NO: 255) to resist microRNA. In some embodiments, the present disclosure recognizes that one challenge of exogenously providing a polynucleotide that encodes a functional (e.g., wild type, e.g., gain-of-function) KCNQ4 gene product is that it may, in some embodiments, be vulnerable to microRNA-mediated (e.g., exogenously provided and/or endogenous miRNAs) degradation. In some such embodiments, the present disclosure recognizes that codon optimization, which may change a polynucleotide sequence without materially altering the polypeptide sequence of a KCNQ4 gene product, may be more resistant to microRNA-mediated degradation as compared to a non-codon optimized (i.e., wild-type) KCNQ4 gene sequence. In some embodiments, a construct comprising a codon-optimized KCNQ4 polynucleotide can be used in conjunction with a construct comprising an miRNA. In some embodiments, such miRNA can be used to knock-down (or suppress) a loss-of-function KCNQ4 variant.

[0154] As another example, in some embodiments, the present disclosure describes exemplary constructs that can for delivery of a gRNA to be used in conjunction with a CRISPR/Cas9-mediated genome editing strategy as described herein. In some embodiments, such exemplary constructs comprise a gRNA that targets a SaCas9 enzyme to an appropriate genomic location. In some embodiments, such exemplary constructs comprise a gRNA that targets a SaCas9 enzyme to an appropriate genomic location in addition to a KCNQ4 construct that has been engineered to resist SaCas9-mediated gene silencing (e.g., Exemplary Construct pITR-CMV.hKCNQ4codop.U6-hsammu386Fw sequence (SEQ ID NO: 269) or Exemplary pITR-CMV.hKCNQ4codop.U6-hsa408Rev sequence (SEQ ID NOs: 270 or 273).

[0155] The present disclosure recognizes that one challenge of exogenously providing a polynucleotide that encodes a functional (e.g., wild type, e.g., gain-of-function) KCNQ4 gene product is that it may, in some embodiments, be vulnerable to microRNA-mediated degradation (exogenously provided and/or endogenous miRNAs) or gRNA interference (e.g., via gRNA binding). In some such embodiments, the present disclosure recognizes that codon optimization, which changes a polynucleotide sequence without materially altering its resultant polypeptide sequence, of, e.g., a KCNQ4 gene product, may be more resistant to microRNA-mediated degradation or to gRNA binding, as compared to a non-codon optimized (i.e., wild-type) KCNQ4 gene sequence. In some embodiments, a construct comprising a codon-optimized KCNQ4 polynucleotide can be used in conjunction with a construct comprising an miRNA, which miRNA can be used to knock-down (suppress) a loss-of-function KCNQ4 variant. Exemplary codon-optimized sequences that resist miRNA-mediated degradation or gRNA binding may be or comprise SEQ ID NO:s 9 or 10 or portions thereof, respectively.

[0156] Changes in a wild-type sequence of a KCNQ4 gene can be or comprise missense or nonsense mutations. In some such embodiments, a resultant Kv7.4 protein is a loss-of-function variant (e.g., a protein that antagonizes normal channel function). In some such embodiments, changes in a wild-type sequence of KCNQ4 can result in hearing loss or increase risk of hearing loss in progeny of a subject that has at least one change in one copy of a KCNQ4 gene.

[0157] KCNQ4-mediated hearing loss is transmitted in an autosomal dominant manner; that is, a mutation in one copy of KCNQ4 can result in hearing loss. Many allelic variants in KCNQ4 are known and at least thirty different loss-of-function KCNQ4 mutations have been identified, thus far, localized to various different genomic regions. In some embodiments, a change in a wild-type sequence is a change in an exonic sequence. For example, the three most frequent missense mutations described in the DVD (Deafness Variation Database) are F182L (exon 4), V672M and S680F (exon 14). In some embodiments, a change in a wild-type sequence is a change in an intronic sequence. For example, as is known to those of skill in the art, in some embodiments, an intronic (splice acceptor) mutation causes DFNA2 (c.1044-1051del) or A349PfsX19.

[0158] The present disclosure includes technologies that may, in some embodiments, targeting a KCNQ4 gene product, e.g., a KCNQ4 transcript, e.g., a KCNQ4 mRNA (SEQ ID NO:4). In some embodiments, an inhibitory nucleic acid molecule or genome editing system targets nucleotides of SEQ ID NOs: 1-10 and/or 25-30 and/or 90-91, or a portion thereof. In some embodiments, an inhibitory nucleic acid molecule or genome editing system comprises (i) a nucleotide sequence that is at least 85%, 90%, 91%, 92%, 93%, 94%, 95%, 96%, 97%, 98%, 99%, or 100% identical to any one of SEQ ID NOs:42-70 or SEQ ID NOs: 96-97 (or a portion thereof) and/or (ii) a nucleotide sequence that is complementary to a nucleotide sequence that is at least 90%, 91%, 92%, 93%, 94%, 95%, 96%, 97%, 98%, 99%, or 100% identical to any one of SEQ ID NOs:1-10 and/or 25-30 and/or 90-91 (or a portion thereof).

[0159] The amino acid and nucleotide sequences of human KCNQ4 are known in the art and can be found in publicly available databases, for example, the National Center for Biotechnology Information (NCBI) Reference Sequence (RefSeq) database, where they are listed under RefSeq accession numbers NP_004691 (current accession.version number NP_004691.2) and NM_004700 (current accession.version number NM_004700.4), respectively (where “amino acid sequence” refers to the sequence of the KCNQ4 polypeptide and “nucleotide sequence” in this context refers to the KCNQ4 mRNA sequence as represented in genomic DNA, it being understood that the actual mRNA nucleotide sequence contains U rather than T).

[0160] The human KCNQ4 gene has been assigned NCBI Gene ID: 9132, and the genomic KCNQ4 sequence has RefSeq accession number NG_008139 (current accession.version number NG_008139.3). The nucleotide sequence of human KCNQ4 mRNA is set forth as SEQ ID NO: 4.

[0161] In some embodiments, a KCNQ4 nucleic acid sequence is a codon optimized sequence. In some embodiments, the codon optimized sequence is approximately 70, 75, 80, 85, 90, 95, 96, 97, 98, 99, 99.5 or 99.9% similar to the wild-type KCNQ4 nucleic acid sequence or any known functional variant thereof, which variant is capable of generating a functional gene product.

[0162] The present disclosure recognizes that certain changes to a polynucleotide sequence will not impact its expression or a protein encoded by said polynucleotide. For example, in some embodiments, a polynucleotide comprises a KCNQ4 gene having one or more silent mutations. In some such embodiments, the disclosure provides a polynucleotide that comprises a KCNQ4 gene having one or more silent mutations, e.g., a KCNQ4 gene having a sequence different from SEQ ID NOs: 1-10 and/or 25-30 and/or 90-91, but encoding the same amino acid sequence as a wild-type or gain-of-function KCNQ4 gene.

[0163] In some embodiments, the disclosure provides a polynucleotide that comprises an KCNQ4 gene or gene product having a sequence different from any of SEQ ID NOs: 1-10 and/or 25-30 and/or 90-91 that encodes an amino acid sequence including one or more mutations (e.g., a different amino acid sequence when compared to that produced from a functional, e.g., wild type, e.g., gain-of-function (e.g., codon-optimized) KCNQ4 gene), where the one or more mutations are conservative amino acid substitutions.

[0164] One skilled in the art would appreciate that a change (e.g., substitution, addition, deletion, etc.) of amino acids that are not conserved between the same protein from different species is less likely to have an effect on the function of a protein and therefore, these amino acids should be selected for mutation. Amino acids that are conserved between the same protein from different species should not be changed (e.g., deleted, added, substituted, etc.), as these mutations are more likely to result in a change in function of a protein.

[0165] In some embodiments, the disclosure provides a polynucleotide that comprises a KCNQ4 gene having a sequence different from SEQ ID NOs: 1-10 and/or 25-30 and/or 90-91 that encodes an amino acid sequence including one or more mutations (e.g., a different amino acid sequence when compared to that produced from a functional (e.g., wild-type, e.g., gain-of-function, e.g., codon-optimized) KCNQ4 gene), where the one or more mutations are not within a characteristic portion of a KCNQ4 gene or encoded Kv7.4 protein.

[0166] In some embodiments, a polynucleotide in accordance with the present disclosure comprises a KCNQ4 gene or gene product that is at least 85%, at least 90%, at least 95%, at least 98%, or at least 99% identical to a sequence of SEQ ID NOs: 1-10 and/or 25-30 and/or 90-91.

[0167] In some embodiments, a polynucleotide in accordance with the present disclosure comprises KCNQ4 sequence that is identical to the sequence of SEQ ID NOs: 1-10 and/or 25-30 and/or 90-91. As will be understood to those of skill in the art, sequences disclosed herein can be optimized or further (e.g., codon optimized) to achieve increased or optimal expression in an animal, e.g., a mammal, e.g., a human. For example, in some embodiments, a polynucleotide of the present disclosure comprises a sequence encoding KCNQ4, which sequence is codon optimized to prevent, e.g., gRNA or miRNA binding, etc.

[0168] By way of non-limiting example, a KCNQ4 polynucleotide in accordance with the present disclosure may be or comprise one or more of the following:

EXEMPLARY HUMAN KCNQ4 mRNA SEQUENCE
(SEQ ID NO: 1)
GACAUGUGAGCGGCGCGCGCCGGUGGCAGGUGGAAAGGCGAGCGGCAUGGAGCGCGUAAUAAGA
GAGUUGGAGUCGGAAAGAGCAGCCCCAGUCGCCGGGGAAGCGGGAGGUCAGUGCGGGCUCCGGC
GGCCCCCAGGCUCCGAGCGCCCGCCCGCGGCCCCGGCCCGGCCCCUAGCCCCCGCCGCCCGCGC
CCGCCCCGGGUCGCCCCUCUGGCCCCGGGUCCGAGCCAUGCGUCUCUGAGCGCCCCGAGCGCGC
CCCCGCCCCGGACCGUGCCCGGGCCCCGGCGCCCCCAGCCCGGCGCCGCCCAUGGCCGAGGCCC
CCCCGCGCCGCCUCGGCCUGGGUCCCCCGCCCGGGGACGCCCCCCGCGCGGAGCUAGUGGCGCU
CACGGCCGUGCAGAGCGAACAGGGCGAGGCGGGCGGGGGCGGCUCCCCGCGCCGCCUCGGCCUC
CUGGGCAGCCCCCUGCCGCCGGGCGCGCCCCUCCCUGGGCCGGGCUCCGGCUCGGGCUCCGCCU
GCGGCCAGCGCUCCUCGGCCGCGCACAAGCGCUACCGCCGCCUGCAGAACUGGGUCUACAACGU
GCUGGAGCGGCCCCGCGGCUGGGCCUUCGUCUACCACGUCUUCAUAUUUUUGCUGGUCUUCAGC
UGCCUGGUGCUGUCUGUGCUGUCCACUAUCCAGGAGCACCAGGAACUUGCCAACGAGUGUCUCC
UCAUCUUGGAAUUCGUGAUGAUCGUGGUUUUCGGCUUGGAGUACAUCGUCCGGGUCUGGUCCGC
CGGAUGCUGCUGCCGCUACCGAGGAUGGCAGGGUCGCUUCCGCUUUGCCAGAAAGCCCUUCUGU
GUCAUCGACUUCAUCGUGUUCGUGGCCUCGGUGGCCGUCAUCGCCGCGGGUACCCAGGGCAACA
UCUUCGCCACGUCCGCGCUGCGCAGCAUGCGCUUCCUGCAGAUCCUGCGCAUGGUGCGCAUGGA
CCGCCGCGGCGGCACCUGGAAGCUGCUGGGCUCAGUGGUCUACGCGCAUAGCAAGGAGCUGAUC
ACCGCCUGGUACAUCGGGUUCCUGGUGCUCAUCUUCGCCUCCUUCCUGGUCUACCUGGCUGAGA
AGGACGCCAACUCCGACUUCUCCUCCUACGCCGACUCGCUCUGGUGGGGGACGAUUACAUUGAC
AACCAUCGGCUAUGGUGACAAGACACCGCACACAUGGCUGGGCAGGGUCCUGGCUGCUGGCUUC
GCCUUACUGGGCAUCUCUUUCUUUGCCCUGCCUGCCGGCAUCCUAGGCUCCGGCUUUGCCCUGA
AGGUCCAGGAGCAGCACCGGCAGAAGCACUUCGAGAAGCGGAGGAUGCCGGCAGCCAACCUCAU
CCAGGCUGCCUGGCGCCUGUACUCCACCGAUAUGAGCCGGGCCUACCUGACAGCCACCUGGUAC
UACUAUGACAGUAUCCUCCCAUCCUUCAGAGAGCUGGCCCUCUUGUUUGAGCACGUGCAACGGG
CCCGCAAUGGGGGCCUACGGCCCCUGGAGGUGCGGCGGGCGCCGGUACCCGACGGAGCACCCUC
CCGUUACCCGCCCGUUGCCACCUGCCACCGGCCGGGCAGCACCUCCUUCUGCCCUGGGGAAAGC
AGCCGGAUGGGCAUCAAAGACCGCAUCCGCAUGGGCAGCUCCCAGCGGCGGACGGGUCCUUCCA
AGCAGCAUCUGGCACCUCCAACAAUGCCCACCUCCCCAAGCAGCGAGCAGGUGGGUGAGGCCAC
CAGCCCCACCAAGGUGCAAAAGAGCUGGAGCUUCAAUGACCGCACCCGCUUCCGGGCAUCUCUG
AGACUCAAACCCCGCACCUCUGCUGAGGAUGCCCCCUCAGAGGAAGUAGCAGAGGAGAAGAGCU
ACCAGUGUGAGCUCACGGUGGACGACAUCAUGCCUGCUGUGAAGACAGUCAUCCGCUCCAUCAG
GAUUCUCAAGUUCCUGGUGGCCAAAAGGAAAUUCAAGGAGACACUGCGACCGUACGACGUGAAG
GACGUCAUUGAGCAGUACUCAGCAGGCCACCUGGACAUGCUGGGCCGGAUCAAGAGCCUGCAAA
CUCGGGUGGACCAAAUUGUGGGUCGGGGGCCCGGGGACAGGAAGGCCCGGGAGAAGGGCGACAA
GGGGCCCUCCGACGCGGAGGUGGUGGAUGAAAUCAGCAUGAUGGGACGCGUGGUCAAGGUGGAG
AAGCAGGUGCAGUCCAUCGAGCACAAGCUGGACCUGCUGUUGGGCUUCUAUUCGCGCUGCCUGC
GCUCUGGCACCUCGGCCAGCCUGGGCGCCGUGCAAGUGCCGCUGUUCGACCCCGACAUCACCUC
CGACUACCACAGCCCUGUGGACCACGAGGACAUCUCCGUCUCCGCACAGACGCUCAGCAUCUCC
CGCUCGGUCAGCACCAACAUGGACUGAGGGACUUCUCAGAGGCAGGGCAGCACACGGCCAGCCC
CGCGGCCUGGCGCUCCGACUGCCCUCUGAGGCCUCCGGACUCCUCUCGUACUUGAACUCACUCC
CUCACGGGGAGAGAGACCACACGCAGUAUUGAGCUGCCUGAGUGGGCGUGGUACCUGCUGUGGG
UGCCAGCGCCCCUUCCCCACCUCAGGAGCGUGAGAUGCCAGGUCGCACAGAGGGCAGCAGCAGC
GGCCGUCCCGCGGCCUCUGGGCCCCCCAGUGCCCUGCCCACUCCAUCAAGGCCCUAUGUGGCCC
ACCUGGCAGGGGCACAGCCCCGGGAGUGGGAGCGGGCGCUGGGGCCCUGGGCCCUGACCCAGCU
UCCAGCUAUGCAAGGUGAGGUCUCUGGCCCACCCUUCGGACACAGCAGGGAAGCCCUCCCGCCA
AGUCCCCGCCCCACUUGGGGGUGGGCCAAGGUGCCCCCACAGGUACCCACAAAGCACAGGACCC
UGCCACAAGGCAGGUGGACACCAUAUAUGCAAACCAUGUUAAAUAUGCAACUUUGGGGACCCCC
AUGGGGUCUCUCUGUCCCUCCCCCAUUGGGAGCUGGGCCCCCAGCAGUAGCUGGUCUCAGGCUG
CUUGGCCACCACCCUGUCCCUAUUCUUUGGCUUAUCACUCCUUCCCCUCCCAGCAUGGGGCCUG
UUUCUCCCCUGCCCUCUCCUAAGGGCAAUGCCUGGGCCUUUCUUCCCAUUUGCAAGUGUCAGCU
CCCAGGGGCUCCCUCCUCCUGCUGGGUGGCCACUCCCCUCCUUGGCCCUCCAGACACCACUCAU
AGUCAGCACAGGUUUCUGUAUCCUCCCCAAAACUCCCAGACAGUGCUUCGUGGACGAUCGCACA
AACAUAGCCUUUUAGUUUCUCCAGACAGGAAGAAAGCCUCUCACACUUAAACAUGCAAUGACGU
GACACACUUGGAGACAUGAGUGCAGAGCCACUCAGCCGCUCCUGGGCCUCUGCAGCAGAUGCCA
GUGGACUGGCCUUGCAGGGUGACGACCACUAAGAGGAAGACCCCCAACUCCAUCUGAGCAGGAG
AAGGAGCUUUGAAGUAACCCGAGAGCUCUCCAGGCCCCACCCAGACCUUUACCCGCUCCCCUUC
UUCAAGAAGAUCUCCUCCUCUCUGGUCCAGGAGCCCUAACCCACUGCCUCUGCCUGUCCCCAAG
GGCCCGCCUCCGUGUCUCCACAGCACAACUCGGGCCCAGGCCUGACACCACUGGAGAGACCCCA
GGCCCACUUCUAGCCAGGCCUGUGCCUUCCUAGUCACUCUAACUCCCAGAGAGAAUAAGAAUGC
AUGUAAUAGCUAUACCAACCGCGCAUCCGGCUUUCACAUGCACUGUCUCCCCUCCCUCCACACC
CCACUUCUUCACUUCAAUUGGCAGCGCCACAUCCAGGCGUCAGCCCCCAUUCACUCCAGGAACA
CUUUCUUAUCCCCACCCCUUUGCUCCUCUUCUGCAAAGCCAAUGCAGGUGGCAGGAAGGUGAGG
GGUAGUGGACCAAUGGCAACCCUCUGUGGGAACAAGGGGCCGAGGCCACGCUGCCUGCAUCUCG
UGCUGGGGACCUGCAUGCGCCAGCACCAGGGCUUGGACUGGAUCUUACUCAGUCCAUGGUGCCC
AGCCUCUGCCCCAACAUGCCCUCUGCAUGUGACCGUCAUGCCCUGGAUGGAGCCACUCCUGGCU
CACCCCACCUGCACUGCACUGUCCCCAGAGAGCCACCCCUCCACCCACUCAGAGACAGCUGUGG
AGAGGGCCAGGAGAAUGGGAUUACCCUAUGACCAAGGAGACAUGGGAAGAAGCCCUCCUUCCUU
CCACGAUCGAGGUUCCGCCAUCAACUCGGUUCUCGGAUAUGCAAGUACCUCACUUUGUUAACUU
AUUAACUUAUUGGUUUCAUUAAAGUUUUCAAGAGGA; (from RefSeq accession number
NM_004700.4 with Treplaced by U; AUG initiation codon in underlined
bold italics, starting at position 308).
EXEMPLARY HUMAN KCNQ4 ISOFORM A cDNA CODING
SEQUENCE
(SEQ ID NO: 2)
ATGGCCGAGGCCCCCCCGCGCCGCCTCGGCCTGGGTCCCCCGCCCGGGGACGCCCCCCGCGCGG
AGCTAGTGGCGCTCACGGCCGTGCAGAGCGAACAGGGCGAGGCGGGCGGGGGCGGCTCCCCGCG
CCGCCTCGGCCTCCTGGGCAGCCCCCTGCCGCCGGGCGCGCCCCTCCCTGGGCCGGGCTCCGGC
TCGGGCTCCGCCTGCGGCCAGCGCTCCTCGGCCGCGCACAAGCGCTACCGCCGCCTGCAGAACT
GGGTCTACAACGTGCTGGAGCGGCCCCGCGGCTGGGCCTTCGTCTACCACGTCTTCATATTTTT
GCTGGTCTTCAGCTGCCTGGTGCTGTCTGTGCTGTCCACTATCCAGGAGCACCAGGAACTTGCC
AACGAGTGTCTCCTCATCTTGGAATTCGTGATGATCGTGGTTTTCGGCTTGGAGTACATCGTCC
GGGTCTGGTCCGCCGGATGCTGCTGCCGCTACCGAGGATGGCAGGGTCGCTTCCGCTTTGCCAG
AAAGCCCTTCTGTGTCATCGACTTCATCGTGTTCGTGGCCTCGGTGGCCGTCATCGCCGCGGGT
ACCCAGGGCAACATCTTCGCCACGTCCGCGCTGCGCAGCATGCGCTTCCTGCAGATCCTGCGCA
TGGTGCGCATGGACCGCCGCGGCGGCACCTGGAAGCTGCTGGGCTCAGTGGTCTACGCGCATAG
CAAGGAGCTGATCACCGCCTGGTACATCGGGTTCCTGGTGCTCATCTTCGCCTCCTTCCTGGTC
TACCTGGCTGAGAAGGACGCCAACTCCGACTTCTCCTCCTACGCCGACTCGCTCTGGTGGGGGA
CGATTACATTGACAACCATCGGCTATGGTGACAAGACACCGCACACATGGCTGGGCAGGGTCCT
GGCTGCTGGCTTCGCCTTACTGGGCATCTCTTTCTTTGCCCTGCCTGCCGGCATCCTAGGCTCC
GGCTTTGCCCTGAAGGTCCAGGAGCAGCACCGGCAGAAGCACTTCGAGAAGCGGAGGATGCCGG
CAGCCAACCTCATCCAGGCTGCCTGGCGCCTGTACTCCACCGATATGAGCCGGGCCTACCTGAC
AGCCACCTGGTACTACTATGACAGTATCCTCCCATCCTTCAGAGAGCTGGCCCTCTTGTTTGAG
CACGTGCAACGGGCCCGCAATGGGGGCCTACGGCCCCTGGAGGTGCGGCGGGCGCCGGTACCCG
ACGGAGCACCCTCCCGTTACCCGCCCGTTGCCACCTGCCACCGGCCGGGCAGCACCTCCTTCTG
CCCTGGGGAAAGCAGCCGGATGGGCATCAAAGACCGCATCCGCATGGGCAGCTCCCAGCGGCGG
ACGGGTCCTTCCAAGCAGCATCTGGCACCTCCAACAATGCCCACCTCCCCAAGCAGCGAGCAGG
TGGGTGAGGCCACCAGCCCCACCAAGGTGCAAAAGAGCTGGAGCTTCAATGACCGCACCCGCTT
CCGGGCATCTCTGAGACTCAAACCCCGCACCTCTGCTGAGGATGCCCCCTCAGAGGAAGTAGCA
GAGGAGAAGAGCTACCAGTGTGAGCTCACGGTGGACGACATCATGCCTGCTGTGAAGACAGTCA
TCCGCTCCATCAGGATTCTCAAGTTCCTGGTGGCCAAAAGGAAATTCAAGGAGACACTGCGACC
GTACGACGTGAAGGACGTCATTGAGCAGTACTCAGCAGGCCACCTGGACATGCTGGGCCGGATC
AAGAGCCTGCAAACTCGGGTGGACCAAATTGTGGGTCGGGGGCCCGGGGACAGGAAGGCCCGGG
AGAAGGGCGACAAGGGGCCCTCCGACGCGGAGGTGGTGGATGAAATCAGCATGATGGGACGCGT
GGTCAAGGTGGAGAAGCAGGTGCAGTCCATCGAGCACAAGCTGGACCTGCTGTTGGGCTTCTAT
TCGCGCTGCCTGCGCTCTGGCACCTCGGCCAGCCTGGGCGCCGTGCAAGTGCCGCTGTTCGACC
CCGACATCACCTCCGACTACCACAGCCCTGTGGACCACGAGGACATCTCCGTCTCCGCACAGAC
GCTCAGCATCTCCCGCTCGGTCAGCACCAACATGGACTGA
EXEMPLARY HUMAN KCNQ4 ISOFORM A cDNA SEQUENCE
(WITHOUT STOP CODON)
(SEQ ID NO: 90)
ATGGCCGAGGCCCCCCCGCGCCGCCTCGGCCTGGGTCCCCCGCCCGGGGACGCCCCCCGCGCGG
AGCTAGTGGCGCTCACGGCCGTGCAGAGCGAACAGGGCGAGGCGGGCGGGGGCGGCTCCCCGCG
CCGCCTCGGCCTCCTGGGCAGCCCCCTGCCGCCGGGCGCGCCCCTCCCTGGGCCGGGCTCCGGC
TCGGGCTCCGCCTGCGGCCAGCGCTCCTCGGCCGCGCACAAGCGCTACCGCCGCCTGCAGAACT
GGGTCTACAACGTGCTGGAGCGGCCCCGCGGCTGGGCCTTCGTCTACCACGTCTTCATATTTTT
GCTGGTCTTCAGCTGCCTGGTGCTGTCTGTGCTGTCCACTATCCAGGAGCACCAGGAACTTGCC
AACGAGTGTCTCCTCATCTTGGAATTCGTGATGATCGTGGTTTTCGGCTTGGAGTACATCGTCC
GGGTCTGGTCCGCCGGATGCTGCTGCCGCTACCGAGGATGGCAGGGTCGCTTCCGCTTTGCCAG
AAAGCCCTTCTGTGTCATCGACTTCATCGTGTTCGTGGCCTCGGTGGCCGTCATCGCCGCGGGT
ACCCAGGGCAACATCTTCGCCACGTCCGCGCTGCGCAGCATGCGCTTCCTGCAGATCCTGCGCA
TGGTGCGCATGGACCGCCGCGGCGGCACCTGGAAGCTGCTGGGCTCAGTGGTCTACGCGCATAG
CAAGGAGCTGATCACCGCCTGGTACATCGGGTTCCTGGTGCTCATCTTCGCCTCCTTCCTGGTC
TACCTGGCTGAGAAGGACGCCAACTCCGACTTCTCCTCCTACGCCGACTCGCTCTGGTGGGGGA
CGATTACATTGACAACCATCGGCTATGGTGACAAGACACCGCACACATGGCTGGGCAGGGTCCT
GGCTGCTGGCTTCGCCTTACTGGGCATCTCTTTCTTTGCCCTGCCTGCCGGCATCCTAGGCTCC
GGCTTTGCCCTGAAGGTCCAGGAGCAGCACCGGCAGAAGCACTTCGAGAAGCGGAGGATGCCGG
CAGCCAACCTCATCCAGGCTGCCTGGCGCCTGTACTCCACCGATATGAGCCGGGCCTACCTGAC
AGCCACCTGGTACTACTATGACAGTATCCTCCCATCCTTCAGAGAGCTGGCCCTCTTGTTTGAG
CACGTGCAACGGGCCCGCAATGGGGGCCTACGGCCCCTGGAGGTGCGGCGGGCGCCGGTACCCG
ACGGAGCACCCTCCCGTTACCCGCCCGTTGCCACCTGCCACCGGCCGGGCAGCACCTCCTTCTG
CCCTGGGGAAAGCAGCCGGATGGGCATCAAAGACCGCATCCGCATGGGCAGCTCCCAGCGGCGG
ACGGGTCCTTCCAAGCAGCATCTGGCACCTCCAACAATGCCCACCTCCCCAAGCAGCGAGCAGG
TGGGTGAGGCCACCAGCCCCACCAAGGTGCAAAAGAGCTGGAGCTTCAATGACCGCACCCGCTT
CCGGGCATCTCTGAGACTCAAACCCCGCACCTCTGCTGAGGATGCCCCCTCAGAGGAAGTAGCA
GAGGAGAAGAGCTACCAGTGTGAGCTCACGGTGGACGACATCATGCCTGCTGTGAAGACAGTCA
TCCGCTCCATCAGGATTCTCAAGTTCCTGGTGGCCAAAAGGAAATTCAAGGAGACACTGCGACC
GTACGACGTGAAGGACGTCATTGAGCAGTACTCAGCAGGCCACCTGGACATGCTGGGCCGGATC
AAGAGCCTGCAAACTCGGGTGGACCAAATTGTGGGTCGGGGGCCCGGGGACAGGAAGGCCCGGG
AGAAGGGCGACAAGGGGCCCTCCGACGCGGAGGTGGTGGATGAAATCAGCATGATGGGACGCGT
GGTCAAGGTGGAGAAGCAGGTGCAGTCCATCGAGCACAAGCTGGACCTGCTGTTGGGCTTCTAT
TCGCGCTGCCTGCGCTCTGGCACCTCGGCCAGCCTGGGCGCCGTGCAAGTGCCGCTGTTCGACC
CCGACATCACCTCCGACTACCACAGCCCTGTGGACCACGAGGACATCTCCGTCTCCGCACAGAC
GCTCAGCATCTCCCGCTCGGTCAGCACCAACATGGAC
EXEMPLARY HUMAN KCNQ4 ISOFORM B cDNA CODING
SEQUENCE
(SEQ ID NO: 3)
ATGGCCGAGGCCCCCCCGCGCCGCCTCGGCCTGGGTCCCCCGCCCGGGGACGCCCCCCGCGCGG
AGCTAGTGGCGCTCACGGCCGTGCAGAGCGAACAGGGCGAGGCGGGCGGGGGCGGCTCCCCGCG
CCGCCTCGGCCTCCTGGGCAGCCCCCTGCCGCCGGGCGCGCCCCTCCCTGGGCCGGGCTCCGGC
TCGGGCTCCGCCTGCGGCCAGCGCTCCTCGGCCGCGCACAAGCGCTACCGCCGCCTGCAGAACT
GGGTCTACAACGTGCTGGAGCGGCCCCGCGGCTGGGCCTTCGTCTACCACGTCTTCATATTTTT
GCTGGTCTTCAGCTGCCTGGTGCTGTCTGTGCTGTCCACTATCCAGGAGCACCAGGAACTTGCC
AACGAGTGTCTCCTCATCTTGGAATTCGTGATGATCGTGGTTTTCGGCTTGGAGTACATCGTCC
GGGTCTGGTCCGCCGGATGCTGCTGCCGCTACCGAGGATGGCAGGGTCGCTTCCGCTTTGCCAG
AAAGCCCTTCTGTGTCATCGACTTCATCGTGTTCGTGGCCTCGGTGGCCGTCATCGCCGCGGGT
ACCCAGGGCAACATCTTCGCCACGTCCGCGCTGCGCAGCATGCGCTTCCTGCAGATCCTGCGCA
TGGTGCGCATGGACCGCCGCGGCGGCACCTGGAAGCTGCTGGGCTCAGTGGTCTACGCGCATAG
CAAGGAGCTGATCACCGCCTGGTACATCGGGTTCCTGGTGCTCATCTTCGCCTCCTTCCTGGTC
TACCTGGCTGAGAAGGACGCCAACTCCGACTTCTCCTCCTACGCCGACTCGCTCTGGTGGGGGA
CGATTACATTGACAACCATCGGCTATGGTGACAAGACACCGCACACATGGCTGGGCAGGGTCCT
GGCTGCTGGCTTCGCCTTACTGGGCATCTCTTTCTTTGCCCTGCCTGCCGGCATCCTAGGCTCC
GGCTTTGCCCTGAAGGTCCAGGAGCAGCACCGGCAGAAGCACTTCGAGAAGCGGAGGATGCCGG
CAGCCAACCTCATCCAGGCTGCCTGGCGCCTGTACTCCACCGATATGAGCCGGGCCTACCTGAC
AGCCACCTGGTACTACTATGACAGTATCCTCCCATCCTTCAGCAGCCGGATGGGCATCAAAGAC
CGCATCCGCATGGGCAGCTCCCAGCGGCGGACGGGTCCTTCCAAGCAGCATCTGGCACCTCCAA
CAATGCCCACCTCCCCAAGCAGCGAGCAGGTGGGTGAGGCCACCAGCCCCACCAAGGTGCAAAA
GAGCTGGAGCTTCAATGACCGCACCCGCTTCCGGGCATCTCTGAGACTCAAACCCCGCACCTCT
GCTGAGGATGCCCCCTCAGAGGAAGTAGCAGAGGAGAAGAGCTACCAGTGTGAGCTCACGGTGG
ACGACATCATGCCTGCTGTGAAGACAGTCATCCGCTCCATCAGGATTCTCAAGTTCCTGGTGGC
CAAAAGGAAATTCAAGGAGACACTGCGACCGTACGACGTGAAGGACGTCATTGAGCAGTACTCA
GCAGGCCACCTGGACATGCTGGGCCGGATCAAGAGCCTGCAAACTCGGGTGGACCAAATTGTGG
GTCGGGGGCCCGGGGACAGGAAGGCCCGGGAGAAGGGCGACAAGGGGCCCTCCGACGCGGAGGT
GGTGGATGAAATCAGCATGATGGGACGCGTGGTCAAGGTGGAGAAGCAGGTGCAGTCCATCGAG
CACAAGCTGGACCTGCTGTTGGGCTTCTATTCGCGCTGCCTGCGCTCTGGCACCTCGGCCAGCC
TGGGCGCCGTGCAAGTGCCGCTGTTCGACCCCGACATCACCTCCGACTACCACAGCCCTGTGGA
CCACGAGGACATCTCCGTCTCCGCACAGACGCTCAGCATCTCCCGCTCGGTCAGCACCAACATG
GAGTGA
EXEMPLARY HUMAN KCNQ4 ISOFORM XI cDNA CODING
SEQUENCE
(SEQ ID NO: 4)
ATGCCGGCAGCCAACCTCATCCAGGCTGCCTGGCGCCTGTACTCCACCGATATGAGCCGGGCCT
ACCTGACAGCCACCTGGTACTACTATGACAGTATCCTCCCATCCTTCAGAGAGCTGGCCCTCTT
GTTTGAGCACGTGCAACGGGCCCGCAATGGGGGCCTACGGCCCCTGGAGGTGCGGCGGGCGCCG
GTACCCGACGGAGCACCCTCCCGTTACCCGCCCGTTGCCACCTGCCACCGGCCGGGCAGCACCT
CCTTCTGCCCTGGGGAAAGCAGCCGGATGGGCATCAAAGACCGCATCCGCATGGGCAGCTCCCA
GCGGCGGACGGGTCCTTCCAAGCAGCATCTGGCACCTCCAACAATGCCCACCTCCCCAAGCAGC
GAGCAGGTGGGTGAGGCCACCAGCCCCACCAAGGTGCAAAAGAGCTGGAGCTTCAATGACCGCA
CCCGCTTCCGGGCATCTCTGAGACTCAAACCCCGCACCTCTGCTGAGGATGCCCCCTCAGAGGA
AGTAGCAGAGGAGAAGAGCTACCAGTGTGAGCTCACGGTGGACGACATCATGCCTGCTGTGAAG
ACAGTCATCCGCTCCATCAGGATTCTCAAGTTCCTGGTGGCCAAAAGGAAATTCAAGGAGACAC
TGCGACCGTACGACGTGAAGGACGTCATTGAGCAGTACTCAGCAGGCCACCTGGACATGCTGGG
CCGGATCAAGAGCCTGCAAACTCGGGTGGACCAAATTGTGGGTCGGGGGCCCGGGGACAGGAAG
GCCCGGGAGAAGGGCGACAAGGGGCCCTCCGACGCGGAGGTGGTGGATGAAATCAGCATGATGG
GACGCGTGGTCAAGGTGGAGAAGCAGGTGCAGTCCATCGAGCACAAGCTGGACCTGCTGTTGGG
CTTCTATTCGCGCTGCCTGCGCTCTGGCACCTCGGCCAGCCTGGGCGCCGTGCAAGTGCCGCTG
TTCGACCCCGACATCACCTCCGACTACCACAGCCCTGTGGACCACGAGGACATCTCCGTCTCCG
CACAGACGCTCAGCATCTCCCGCTCGGTCAGCACCAACATGGACTGA
EXEMPLARY HUMAN KCNQ4 GENOMIC DNA SEQUENCE
(SEQ ID NO: 5)
GCAGGACCACAGCACTGTTGCCTTCTGCATGGTCTTCCAGAGGTAGAGGTTAGAGGAAGGATCT
TACAGGAAGAATCCTGAAGGCAGAGGAGGAGCCCTGCAAGAAGGGAGGGCTTTGACCTTCATTT
CCACGCCCCTTTCTCCCTCTGTGTCTCCTCTGTGTGGGCCCCCTCCAGCCCTGAGGATCAATGG
GGGTTCACTTTCACTGAGCTCAGCAACACTGCTCCCTCCCCACTTCCTGTGGCTCTGAGCTGAC
TGGCCTGCTTGGTCTAGGCTGGGGGCTGGTCAGTGCCACACCCAGATCTGGGGAAAAGAAATTC
CTTGGCTGGCGAGGTGGCTCACGCCTGTAATCCCAGCACTTTGGGAGGCCAAGACGGGCGGATC
AGGAGGTCAGGAGATCGAGACCATCCTGGCTAACACGGTGAAACCCCGTCTCTACTAAAAATAC
AAAAAAATTAGCCAGGCATGGTGGCGGGCGCCTGTAGTGCCAGCTACTTGGGAGGCTGAGGCAG
GAGAATGGTGTGAACCCGGGAGGCAGAGCTTGCAGTGAGCCGAGATTGCGCCACTGCACTCCAG
ACTGGGCAACAGAGCGAGACTCCATCTCAAAAAAAAAAAAAAAAGGAAAAGAAAAAGAAATTCC
TTGGGCCCCTCCAGCACCTCGTGGCCTAAGTCTCTTGTCCTTTCTGGGCTGCACAGGGAAAAGG
AAGAAGGCCTTATCTTTCTCTCATGCTTCCTCCTGCTCTCAGTAGAGGTGGGTTCCCAAAGGTC
AATAATGTGATGCCATCACCCCCTGAGCACTCTCCACTCCAATCCCCTCCTAGGAAGGCTTCCT
AGATTGAGAAGAACTGCTAGGACCAGGGAATTCCCAGAGCATCTCCCTGCTCCACCTGAAACAC
GTACCTGAAGAGCAGTCAGACGAATGGGTCACGTGCGTACAGCCCCCTGCATGGTCTCTAACTT
TTTCATGCATTATTGCATTCAGTGCTGATAGCCAGGGAAAGTGGGGAAGAGGTGGAGTGACTTG
CCCAAGGTCCCCAGGTATTCCACAGGTGGAGCTAGGACTGGAAGCCCAGCCATGACTTGTAGTT
TAGGGCTCTTTCTGCCCCTGGCACTGCCAGCCTCTCTGGATGCTGGTGCCTCCCACTTCACCCA
TCCTGGGTTCTCTCCTAGGGAGCCACAGCCTCTGCAGCATGCCCAGCCTCAGGGCCTGGCCAGG
CTCCCTGTTTCTTATCAGGCCAAATTGGACCCTCCATCCTGGCATTCAAGTCCTCCTGCGTGCC
CCTGGCTAAGCTTGCTCTTCCGAATGCTCTGTAACATTCTTCCCACACCAGTACACACACACAC
ACACACACACACACACACACACACACACACATTAAAGCAGCACCTGAGTGAATTAACAGCCATA
CAAGGCAAGTCTCTTCACTGAGCCTCAGTCTTCTTGAGTGTAACATGGGACCGTGAACAGTATT
ACCGCACAAGGTTGTGGGGATGCTGAAATAGACAATGCAGGTAAAACATCCTGCATAAGGCTTA
GGATTGACTGCAGGCCTCATTAATGGTAGCTGCAGGCATTATTGGTTGTACTTCTCTGCGTCTC
TCCCAGTCCTCCCCACTCCTGTCCCCAAGAAAGCTCCCTCTGCCATTGCCTGTGGAGACTTCTC
CCTCCTCTGAGCTCTAGCAACCCTTGGAGCTGTAAGAAAGCCCAGGGTCAGGTGGCTAGCAGGC
AGAGAGATTTTAGGAGGCAAGTGAGTGGAACCCAGACCTCCTCGCCTCGATTCAACTAGCGCAC
TTCTGCTCCAAAGCTTTGTACACATTGGGGTGCTACCTTACAATTCTGTCGGTAAAAAGGATTC
CATTGCTGATAAAGTCTAAAAATCACTGAGTTAAACCACCCCACCTCTCACTCGAGGAAAGGAA
CCTGAGCCCTTGATTGACCTGGGGTCACAGTGGGAATCACTGACAGGCTTGAGCCTAGCCTGAG
AGACCATAGTCCTAGCCACTTCCTGCCCTCCATCCTTTCAGACCTGGAAGTTTGATCCCTTGGC
ACGAGTAAGTTCTAGAGAACAAGGATTGGCCGTGTATGGTTATCCTCAGCTCCCAGCACCCAGT
GCCCAGCCGGCAGGTGCCAGTCAGTGGAAAGCACAGGTCACAGTTCTGGGGGTCACCAATAGGC
TGTGTAGACTTAGGTGAGTCCCTGTGCCTCTCAGAGCCTCAGCTGTCTCAAGCAAGCTGCTGCT
CTCTGGCCCAAAAGGGACTGGGCCTGGCACACAGATGGCACTCAGCAAATGGAAGCACTCGCCC
TCCCACCCTTCCTCTCAGTCAATACTTGCTCCATTGATGGCTGATGGGGACAGTGATGAATTAC
AGAAGATCTTGGAGCCCTGCCCACTTCTTGCACAGATGGGGAAACAAGTCCAGGGTGGGGAAGA
GACTTGCCCAGGTGGGAGTGAGTCTTAGTGAGTGCGTCTGTCTCCTCAGTGGGGCAGGGAAGCT
TTCGCAGTGTTACCAGGGTGGAGACAGGGCCTGGGGGTGGAAAGGAAACTGCTGAGGGTGGGGT
CAGGGGAACAGGTGGGAGAGGGAAGGAGGAGGGTAGGGAACCACGGTGTCCAGTCCCCTCCAGC
AGAGGGGCCAATTGAGGGAGCCTGAGACAGCTGTTTGCTCAGAAAAGTGTCTTAGTCACTAAAG
GTTGTGGTGGGGAAAGTCCGTCCTCCCAGTCATGTCCTGGGAATCCGGATGGCGCAGGAAGGCC
ACCCGGTGACCCTAAGAGTGGCCACCTGTCCTCTCTGAACTGGACTTTCTCTTCTGGCCCTTCC
ACTCTTCCATGTGTACACATATGCCAAGTAAATTTGCTGTGGCCTCCTGGAACCATCTCCCCCA
TCCCTCTCACCCCTTAGGAAGAGTTCTGTGTCCCTCCATTACCCATACGCCCGCAGGAGAAACA
GGCTTCTATGCCCTATGAAAGTCCTTCCTGAGATCTAACTTCCATCCCTCTAGCTGCAACCACA
GTCTCTTTCCTCTTTCTGCTGCCTTTGAGCAGGTAATCTGGAGCTGGAGTTGGGAATGATGAGA
CACTCCCTGCAGTGAGGGCTCCTCACAAGGTGGGGAAGGGACCTTTGTAGTCCCCCAGCTGGGA
AGAGAGCCATGGGATCCAGAGGTGATGCTGAGCTTGAAGATTAGATTTCCCAGAACAGACCCAG
TTTCAGATATTCTGGGTGTTAAGGGCAACCTGAATTCAAATTCCATTTCTGCTACAGAACAAGA
GCCTCAAAAAGACCCCCTAGAAACACCCCCAGGGCGCTTGCAACTGCTTTCCTGTGCACCTTTC
ATGTCCTAGACCTTAGTCCCATTTCCCAGGATCTATGATTGAGAAGAACCAGCCAGGCAGTTCC
ACAGAGGGAGGACAGTGCTGCATATTTTGGGGGTGCCATCTTCAGCTCATAGAGAGAAGATGGG
TTAACTCAGCCCAGGCACCACATCCCTAGTGGGGCCTTGGGGTCCAGAAACTGTCCCCAGCTTC
CAGTAGAGGATCCGGGCATAACCTGCCCTGGGGCACCCGGCTCTGGCCCTGGGCACACCTGGAC
CAGGAGCAGCAGAAGAGATTCAGGTCAGACCCCAGAGGGCACCCCCAGCTAGGCAGAGGGGAAA
GGATCACTATGGGGTAGGGGTGTGGGCCGGTTGCCAAGCCCAGTTTAGGGACCCCACAGATCCC
TGCAGCCCACGGCCCTGCCTCCCTCCCTCCCTCACTGGCGCTCAGCAGATCAATGCTGCCTTTG
CTGACAGCTGAGAATCGAGCTCGCCTTCCCGCCCCTTCCCCCGCCCCTCCCGCTCGGCTTCGTC
CCTCGAGATCCTCCCGGAGGAACCGGGAAGAGTTTGCTGCGGAAGGCTCACCCTGGGGCAGGGC
CTGCGGAGGGAGCGGCTGGTGTGGCCGCAGCTTTCCGTGGAGGAAGAGGGAAAGAGGATCGGGA
AACCCAAGTTACCAACCCTGTGCAGGGCCCAGGAGGGCTAAAGGAGAGGGACTGCCCCCTACAG
CCAGAGAGATGGAGGTCGGGGACTAAGAAAAACTTTCCAGCTGGAGAGGGAATGCCCTGGGACA
AAGTATCCCCTTTTCTGGCTGGGATTCTGTGGGCCTTGGGTAGGGGGTGTGTGTCCCCTCTAAG
GCTGGCTTAGAGCTCATCTCCCAACACTCCATCTGCCCAAACCCAGTTCCCTGACCTGGGAGTG
GGGCAGGGGAGCAGGCCCCTCCATCGGGGAGGATCCTCTTCTGGGCAGGGTGGCTCTTCCCCCA
TCACGATGAAGGGAAGCTCAGAGGTGGCAGTTGGTGGGAGAAAGACACACCCAGGCCCACTGTG
TTCCACACACCCTGATGCTGCCTAGCAGCCCGTGGGCTCCAGGCCTTTCAGGTAAGAGCAGGAC
AACCGCCGCTGCCCACCCAGCCACACACAGCACTGGGCACACTTTAAGCACCCGCACCAGGCAC
ACAGTGCTCGACCCCAACGGACACACCTCATCCCCTTCGGACTCCACCTCCACTTTCGCAGCCA
CCCACACCCGACCCATAACTCACACCTCACTGACTCCATCCCCGCACCTGGTAGACCCACAGCC
ACCCACCCTGCACACACAAGTAGACGCCGTTCCACCGGTCTACACCTAAACTCCACGGGACACT
GCGTCCCTTCCCCTGCCGCCCGCGGCCACAACTCCACATTCCACTTTCCACAAGCACACACGAG
GCGTCCCACCCCGGGCTGGCCTTCGGGGCCACACTGCCCCACGCAGCGGTGGACACCACTTGCA
CGCGTCCGGCTTCCCGGCCCCGCGCGCTGCCCCCGCCACGCGGTTCGGCCCAGGCACCAACTCG
GCCGCCCGTGCGCCCTGCCCCGCCGCCTGCTCCGCGCGTTCCCTCCCTCCGCCTCGCCTCGCTT
GCTCGCTCGCTCCCTCCCGATTTGGGAAGGCGGCCGCGGGGCGGGCGGGGGAGGGGCGGGGCGG
GGGAGGGTGACATGTGAGCGGCGCGCGCCGGTGGCAGGTGGAAAGGCGAGCGGCATGGAGCGCG
TAATAAGAGAGTTGGAGTCGGAAAGAGCAGCCCCAGTCGCCGGGGAAGCGGGAGGTCAGTGCGG
GCTCCGGCGGCCCCCAGGCTCCGAGCGCCCGCCCGCGGCCCCGGCCCGGCCCCTAGCCCCCGCC
GCCCGCGCCCGCCCCGGGTCGCCCCTCTGGCCCCGGGTCCGAGCCATGCGTCTCTGAGCGCCCC
GAGCGCGCCCCCGCCCCGGACCGTGCCCGGGCCCCGGCGCCCCCAGCCCGGCGCCGCCCATGGC
CGAGGCCCCCCCGCGCCGCCTCGGCCTGGGTCCCCCGCCCGGGGACGCCCCCCGCGCGGAGCTA
GTGGCGCTCACGGCCGTGCAGAGCGAACAGGGCGAGGCGGGCGGGGGCGGCTCCCCGCGCCGCC
TCGGCCTCCTGGGCAGCCCCCTGCCGCCGGGCGCGCCCCTCCCTGGGCCGGGCTCCGGCTCGGG
CTCCGCCTGCGGCCAGCGCTCCTCGGCCGCGCACAAGCGCTACCGCCGCCTGCAGAACTGGGTC
TACAACGTGCTGGAGCGGCCCCGCGGCTGGGCCTTCGTCTACCACGTCTTCATGTGAGTTTGCG
ACCCCGCGCCCTTCCGCGTTTCCCCGCGCAAGCCTGGCCTCCCGGGGCACGGCCGCCCCGCCCT
GGCTCCGCCTTCTACCCCCCTGCCTCAGGGCCGACCCTCATCTCTCTCCCCCCAGGCCTAAGCC
CGGTTTCTGATCCCCTCGCTGAGCCCGACCCTAAGCCCTGATCTCCCAGGCCTGACCCCTGCTT
GACCTCGCTTCTGACCTCCCCGCACCGCAACTGCTTATTTCCATCCTGACCGCCAATCTCTGCT
CCTCTGTCCCAGGTACTCCCGACCGCCAGCTGCCTCCCCCAAGTCCGCTTGGCGAAGTCTGGGG
CCCCTGGAGTGGGCGCCCTTTTCCTCTTCCCCACCCCTGCCTCCCTGTGTCCCAGACACAAAGA
GGAACCCTTGGCTCCCACACGCTTCTGTCACCTGCTCCCCAGCTCTGAGCTATGAAGGGCTCCC
CTCAGGGGTGCTCCTCTCCAGGGCGGCCCTCATTCCTACCCCTGCCCAGCTGACTGTGGGTGTG
TGGGGGTCCCTGTGGGCCCCCTGGGCCCTGACACTCGCATATGCTGTGTCCGACTTGATCTGTG
TCTTCGCTCAGTCTTCCCCTCCACCCTCAACTTCCCAGTGGCAACGGCGGCCGCCCTGCCTGCC
CTGCCCTACCCTGCCGGCTTGGCCCAGCTCGCCTGCCTTGTTGGCTGGCAGCACCAGGCCTGGC
TCTAGGCACCAGGGGAAAAAGAAAGAGGAGAGGGGTAGGTTTGGAAACACTGACGCTGCTGGGG
CCCCCTCCTCCCTCTCACCAGGCTCCTACAACTTTCAAAAACACTGACCCCTCTTGGGTGTGAA
GAGTGAATTTTGGCAGCTCAGAGCTCAGTCTTGGGGTACGGCCTGGCCCAGCCAGGAACATGAG
AGGCCCCGCAGATATCAGTTGAAGGGCTGGGCCTGACGCTGGGACGCTCAGAGGTGCCCAGAGA
GAGACCTCTGGTCCCTGGAAAATGTGTGGCTATTAATCCCTTTTTGCTGCCACCAGAGAGGGCC
CTTTGGCGCTGGGGTCTCCTGGGTGGCCCACCTGCCTGCCCACCTGACTGTCTAGCAGCCCTCC
TGCTGGCCTGGCTGTCCCTCTGCCAGCCTGAGTTTCCACCTGTGTGCGAGTTGGCCAGTCTGCT
CACCCTTCCACCTAACTGTCCGCAGTCCTTCTGCTTGCCTGTTTCCATCCATCTGTGGCCTGTG
CAGTTATCCGGGTGCCTGTCTGTGCATCTGCCTATCCACCTGTCCACCTGACTGTCCACTCTTC
CTCTACCTGTCTTTTCCACCTGTCTCTGGGTCTGTCCTTCGGCCTGTTTCTCGGGTGCTTGCTG
GCCTGCCTCTGCCCCATCTGAACTGGGCCCACATAATTTCAGAGGTGAAGGGGAGAAAGATGCG
GCACAGGGAGGGGCAGGGGGGGAAGACAGCAGGGCTCTCTCGGCCATTAAGTGCGTTGGGGGTG
GCAACCTTGACTCTGTGCAGAGACCTCAGCTGGGCTAGGCTGGGGCAGAGAGTTGAAATTGCTC
AGGACATGAGGTCAAGCTTCGGTTCAGGGTCAACGGTTTGTAGTAGCCCAGTCCTTAGTGTCCA
TTGGGAGGCCTAGGATGAATATTTGTGGCTATAAAGAGGCCCGTTGGAGTGAGGAAGGCCCAGG
GCTGGTGGAGTTGGGGGTGAGGGGATGGGGACTACTTCTTAGGAGTGGCTACAGAGCAGCCTCC
TTGAGTGCCTAAGGAGGGTGAGACACCCCCCAGAGAACAACTGTGCCCTCCGTGGGCTCCTCTT
GGGAAGGGACTTTTCCAAGGCATGGCAGGGCCTGGGGAAGCCAATAGGGCTCTGAGGTGGGGTC
CTTACCCCCCCAGGCTTGGCCTTACAGCCCCCACAAGGGTCAGTGGAGGTGAAGGACCTGCCTC
CTGTCCCCTGGCCAGCTGCTGTTGGTGCCTCCTTTGAAAGGACCGCCCCTTCCTCTCCAGGAGC
TAATCCACTGGCACCTTTGCCCCACATCCTGCCCTTTCCTGATGCCAGGAAATGCCCTCGCCAG
GGCCGTGCTTGTCCTGACCACTTGTCCCCGGGAGCCCAGGGCCAGGGCATGTCTTGGGAACTCT
GGGGGAAGAAGTATGGTGTGAAAGTGTCCTGGTGTTTAAGGATCTCAGGGAATTGGTCACCCAT
CTTAGAGGTCAAAGGGGACAGAGGTGTCAGGAACCCCACCTCTTATGTGCTCTGTGACGTTGGG
TTGATTGCTGGGCCTCTCTGAGCTTTAGGTCTGTAGGTTGTCAAAGCGGGTAGAAACCCCAACC
TTGCGGCCTCTCTCTTGGATGAGGTAATAGAGTGGGAAAGAGCTTGGTAAGCTCCAGGGGCCTG
TCTGAGCTTGAAAGACGGTTGTTATTATTGGGGCTGGAGGAGGGGGCCCACACAGAAGGTCTCT
CCTGTTTGTGAGGAGCTCCAGATGTGGGGTTTCTCAGTCACACTGCAGGGTCTTGCCAGGAAGT
ACTTCCTGCTGTTGGACTCCTAGCCAGACCATTACACTTTGGGTCAAATCCTTTCTCCTCTTCC
CAATCTGCCTCAGTGGCAGCCCAAGTGAGGGGAGTCCAGGGAGTACTGTTAGCTAGGACCCCCT
TCCCAGAGACGCAGGCTGTGGCAGGAGGGGCCCCAGCAGAAGAGCCTGCAAGAGAAGGGCTCTG
GGCGGGGCGCAGTGGCTCTCACCTGTAATCCCAGCACTGTGAGAGGCTGAGGTGGGAGGATCGC
TTGAGCCTAGGCAACATGGTGAGACCCCTGACTCTACAAAATTTAAAAATTAGCCGGGCATGGT
GGTGCACACCTGTAGACACAATTACTTGGGAGGCTGAGGTGGGAGGATCACTTGAACCCAGGAA
TTCTAGGCTATTGTGAACTGTGATTGCACCACTGCATTCCAGCCTGAGTGACAGGATGAGACCC
TATCAATTAAAAAAGAGAGAGAAAGAGAAGGGCTCAGGAAGGAGGGAGCTGGGGTGAGAGGAGC
GCATTCGCCCTAGGGTATGCCTCCCTCCCATCTGCCAGCCCGTCCCCTCTGAGCCCCACACAGA
ACCTGCATCTTTCTGGCTCCAAAAGGTGGGAGATTGCCTAGAGTACAAGCCCAGATTTGGCCTG
TCCTGCGGCAGCTGCAAGCTCTGGGAAGAGAGGACTGCTGACTCCTGTCTTCTCCTGTTGGGAT
CCAGAATGAGGGGCCACTGAGCCCCTCTCCAAGCTTTCCCTCTCTCTGTGGACCCTCAGTCTGA
TCACCAAGCTGCATCCCCCTCCTATGCCCCAGTCCCTGATTTAAGCCCTGAAGCCTTCACAGGC
CCTGCTCTCTGAATTTTAAGAAATACCACCTCGTGGCCCATCCTGCTCGCTGAGCCCTTATGGG
GAATGCTCGCTGTCCCCTTGCTGCCCCCTCTCAAAGGCCACTCCAGCTTCCCTTGAAGTCAGAG
TGCTGGAGGGGGCTGAGCAAGACCCTATCTCCCTTCATCCTCCCCAGCCACTATGAGCCGCAGG
CCTGCCGCTCCCAGCCCCCAGGGCCCAGCAGACTTTCTCTATGTGAAGGTTTGCGGCTCTGTAA
ACATCCTCCCTCAGCCTTGTCCGTGGGGTCAGAAGCTGTGGGAATGGGGAGGGGAGGAGGTGGC
AGCAGCTTCTGGGGCCCGCAGACTCCTAACCCCCGAGCCCCCGACCTCCCACCCCGGCCATCTG
AGAAAGAACATCGCCTGGGTTGGAAATCATCCCAGCAAAGTGTCCTCAGAACCCTCAGGCATCC
CCGCTAGGTCAGTCGGTCCTCACATTTTGACAGCCCCATTTTACTTGTAAGAAAACTGAGGCTC
TGGAGACCAAAGTCACCTGGGAAATGAGTAGCAGATACAGCGGACTCTGTGCAGAGACCTCAGC
TGGGCTAGGCCAGGGCAGAGAGTTGAAATTGCTCCTGCTTCCTTGTCCAGGACTGTTCGCTCCG
TTCCTAGTGGCCACCGGGCTTGGCTCTTGGAGTCTGAAATGAAATCTCTGGTTGTGTGTGCAGC
ACCAACTATGCACAGGGCACCCTGCTGAGCTCTCTCTAAACCGGTCTCATTGTGTCCTTCTGCA
GCCTTGTGAGGTGGGCACTGTTATCCTCCTCATTTGACAGATGGGGAAACTGGGACTCAGCAGA
GGCCACCCAGTTAATGTGGAAGAGCCTCAGCCCGGAGCGGGGGCTGACTGGGAGCTGTTGCGCT
CAGCACCACAGCCTCAGCTAGCAGCACCCCAAGTCCAGGCTCCTCAAGAACAGCACTCCTGTGT
CATCTGTCCGTCCATCCCAGCACCCCGCACACAGTCAGCAGGGGGTGGGCAGTGATGGCATTTT
GTGGAATTGAGTGGAAACTGCCAGCCTCACCCAGTGCAGCCACGTTTTAGTTGTAGACCACGTC
ACTGCTGCGTACCTGTCTGAATGTCTCACACATGCACTCACTGCAACATCGACACACATGCACA
AACACACACACAGCATCCATCCAACAAAAAGAGTTCTAGTTTAGAGCTGCCCCTACCTTTTCCC
TGACTTCACAGACACTCACCATGGACACACACCCGGGCCCGTGGCTCCAGCCCAGACCCCTAGG
ACAGAACAAAGCTTGCTCCTGTCCTTGAGTTTTTGGCCTTCACCTATACACAACTGCAGGGCTG
CCCTTGCGGGTCTGTGTGTATTTGTGTAGCCACCTTGGAGGGCAGCCTCAGAACTGTGGAGGAG
CGGGGTGGCTGGCCTCGTAGAACTTCGCTGGCGTTTGCTCCTCCTGGGGGGTCCTCGGGGGTCC
TTTGATCTGACCTTGGGGTATACTGCTGGGTACACCAAGACACAGAAAGGGGCAGCTACTCATC
CAAGGTCACACCTAGTGAGTTAGTGGAGAACTGTGCCAGGAACCCAAGCCTTTTGTCTCCCAGA
TCAGGACTTTAGATAACAATTTTCCTAACCTAGCCAACAGGGGAGATGGATGCTCTAAGAACTT
TGCCCTTGTGATTGGGAAAGTCTTTGAGTGTGACCCAAATTTTTCGTGCTGCTGTTTTTCAGCC
CTAGTCCTTTTGCTTGGTCTTTGTAAGGAGCTGGGGAGACCATCCTGTTCTTATACTGCCTTCC
TCCTCCTCCTTGCACTCCCCTTCACGCTCCTTTGCCTCCTTCTTCTGAAGTTCTTTGGTGTCAC
TGGAGCCGGTTCGATCTCTCACTGACGGCCCACCCCACCCCAACTCCATAGTACGTTCATTCTT
CCATTGAAGACGCGCTGCTAGATGTCTAACTTCAATCCCTATTGCTGCCGAAGCCCTTATCCTT
GGGATATTTAAGCCAGGAGTGTTTCAAGAGGTGGTTATTATTCTTGGGCTGATGGCAGCACTTT
GAGTGGATGATTAATTTCAGGCTCTCTGAGCCAGTCAAAGGAGCTGGAACTGCCTGGGAGCAGG
GAAAAAGGAAGGCCGAGGCCCTGCCCACAAAGGAGGCTGCCCAGGGAACTTCCCCAGACTCCCT
CCTACCTCCCTAGCACCAATGTGGGTCTTTGGGGAAGGTCCGATCTTCTTGTGGGCTATGGAGC
CCCCCAGCAGGGAATTCTGCATGTTTGCCCTGGGGGAAGCTCCTAGTGTGGGAGTTGAGAGGTT
GAGGATGGGGGAATAGCAGGGACTTTTCGTTTCTCCAGAAGCTGTCCTGCGGGGAGTGAAGAGC
ACGGGCTCTGAGGCTGACAGATCTGCGTTCCTTCCTGGTTCTAGCCTTAGCAGTCGTGTGTCCT
TGGGCAAGTTACTTAACCTCTCTGGGCTTCAGTTTTCTCATCTGAAAAATGGGAGTAATCATAA
TACCTGCCTCTAAGATTGTCAGGACTGGATGAGATAAGGCACCGAACACTGCTGGGCACTGTTA
GCCATGATCATCGTTACTGTTATTATTATGCTGTTATCACTGTCCTCATTCTTCTCCTCCGGGG
AGAGGTGTGGTAGGTGTGCTGGGCTCAGCAAGGTGAGTGTGTCTGAGTCTGCTCTGGAGAGAAT
AGGAGCTATGTCTGCCTGTGTCCTGGGGCGAGTGGTTCTCCATGGGAGCTGAGGCTGTGTCTTT
TCAGCCTCCTGTGGGCCCTGCCCATGAGAGTGTCTGACTTACATTCTCTCGTGTAACGCTCACA
GCCATCTTATCAGGTGGGTGCTGTCTTCTTCATGTCACAGTTGAGCAAAGTGAGGCTGGGTGAG
GGGATGTCACCCAGCTCATGAATGGAGCCCAGCCTGGCTACCTAGCATGCTCACTGATTTGTTT
CTTCCTTCATCTGGCAAACAGTTACAGAGCATCAGCTCCATACCAGGACCAGGGAGCCAGAGAG
AGCTAGACCATGCCTGTACCCTGCCTGGCAGAGTGGGGGATTGGGGGTCACTGTGAGGAGGTCG
CAGAGTCTGCCGGGACCACTGGCCTCAGCTGCTTCTTCTCCCAGGGAGAGGTTTGGAGAGAGGT
CTGGTCTGTGTGTAGCTGTGAGTGTGTCTGTGAGTTATGGGGAGGACGGTGTATGCCAGAGGGC
CACTGTGCGGCCGAGTTTGGGCCTCATGGTCCAACCCTGGCAGCTGGCCTGGCCCCCGAGAGAT
AAAAGTAGAGCCATGGTGCCCAGAGAGACAGCCAGGGACTCCTGGGAGAGGAGGGCACTCCCCC
ACTCTCTCCTGAGCAAATGATCATGGAGAATGAGGGCAGGGAATCCCAAGGGAGATTTAGAGAT
CTCAGTCCCCATGCTTACTGGGAAGGTGTCCACCCCCACTCCACCCCAGTTCCTGAGCCTCGGT
ATCTTCTTCTGTAAAATGGGCCTAACAGGAAAGTGGACCTCTCAGGGCTGCCTGGCACACAGTC
GTGGTGGGCAAATGAGAGAGACTGCTGTCTCAGGACCTTGAAATGCATAGGGTACCAGGTAGGG
AGCTCTCTTCCAGCATCTTCTCTGGGGGCCCCTCAGGTGACAGGGTGCCACTTCACAGGGCACT
CAGGGGGCTGCCTGCCCCCAGTGGAGGCTCTGAGGGGCTGGAGAAAGGGTGCTGAGCCGACCTC
AGTGGCTACACAGAGCCCCCAGGACTTCAGGTTCCCTGGGCAACCCTGTCCCTGGGGCAGGAGC
TGCGTGCCCTGGGGATGAGGCACAGGAGGGGCAGCCCCAGGCAGCAGACTAATTGGGCTGGGAA
TCCGTGGGCAGCGCCTGAGGAAGGGAGGCAACAGGAGCTCAGCGATTCCCTCCCTCCTCACCCC
ACGGAGATTTGGGGGACAGTGGATAGAGCAGGGTCTCTAGCCTAAAGGATGGAGGGAAAATCTT
GAGGCACATTCTCCTGAGACTCCTTGGACACCCAGGCCGGGAAGGTGGGACTGGAGGAAAGCTC
ACTGGAAATAAATGGAGCATGGTTCCCATCAAAGCAGAGGAGATGGAGGTCAGACAGCAGGAAG
GACTGCCCAAGAACCAGGAGGTGAATGAGATTTTCTGGGATATTGTTTCAAAAACTTGGAGCCC
CCTGTCTAGCCGGGCTGGACAACATTTACTCGAATTGTCCCTATCAAGCAAGGAATGGCTCCCT
ACTCCCACAGAGCGAAAGATGGAGGGGAGATGCCTGTTCCCTTTGAGCCCAACTTTGGCGGGGT
GTGGGTCGGGGGTGGGGTAGGGATCAGATCGGGTACCCACTGGCTTTTGGGCAGTGGTGGGAGG
GTCACAGGCTGCTCCTCCTTCTCTGCCACTTCTCTCTGGGAGCCTCGGGCCTGTCCAGGTTGCT
GTCTTTGGGTTTATTTTTTGCTGGGCTTGGCTGTCCCCTGGGAGGGGAGGGGGCAGGGAGAGAA
AGGAAAAGCAGGAACAGCTTTGTCAGCACAATCTCAGGCGCCTTCGCTACTGCCCGTCTTGGCC
CAGCTGCCACCCTCTACTGGAGGGACCAGCCCCTGGGCACAGTGGGGATTCAGACCCTATGGAA
CTTCCTCGCTTAGAGGCAGGACCAGCAGGAAGGGACTAGGCCTTTCTACCCCCATCCTCTCTCC
ATATATCCCTGCTATACAGAACCTCAGGTCTCAGCGCTGGAGCAGATCCACGGGCTTCATTTCA
CAGGTGGGGAAACTGAGGCTAGAAGGGACCTGATGGCTCAAGGGCACAGCCCACACGGGGGCCT
TTTCCACCTTCCCTCCTTATGGAGTAACATGGGAGAAATGCTGCCTCCCTGCTGCCCGTTCCCT
GGGTGAACTCATTCACTCATCTCATTTTCCAGCCTCTGGGGATTGGTGGCAGTCTGGTGGGAGA
GACGGGGGACGGGGAAAGGACAGTGTGACCCATGGCCCAGCAGAGGAAGGGAGGTACAACCTGG
GGATGCACAGAGGCTAGGTGGGGGTATCAATCCCTCCCCTATATGCTTTTTATCCTAAAAAAAT
ACATTCGCCCTATTTTACAGACAGGGGGATTAAGGTGTAAAGAAGTTAATGACTTGCCCAAAGT
CAACATAGCTGACAGGTGGTAGAGGCAGGATTTGAACCTAGCATGTGCATCTCTGGGAGCCATG
CATTTGGCCACTCCACCATGCTGCCTCCCCAAGGGGCCCCTGTGGGCCCTTCTTTCTTTTCTTT
TCTTTCTTTCTTTTTTTTTTTTTTTTTTTTGAAGCAGGGCCTCACTCTGTCACCCACGCTGGAG
TGCATGATCACTATGATCACTGCAGACTCAACCTCCTGGGCTCAAGTGATCCTTCCACCTCACC
CTCCTAAGGAGCTGGGACTACAGGCGCACACCAAGACACCCAGCTAGTTTTTAAATTTTTCTGT
GGAGACAGGGTCTTGCTATGTTGTCCAGGCTGATCTCCAACTCCTGGCTCCAGCGATCCTCCCA
CGGTGGCCTCGGGAGCCACCATGGCTGCCTGCTGGGCCCTTCCTTCTTGAATGCAACCCCCCTG
GCTTTCCTCAAACCTGCCTCTGTGGCTTTTCTCTCTTGGTTCTATCAGCAAGCAGCTCTGCCTC
CTCTTTCTGCCCCTTGAATGTTGGGGCTTTGTCTCAAGTCCTCTTCACAGTACATAGTTTCAGG
GGGTGGTCTCATGCACTCCTACGACATCAGGGGTCACCCCTATGATGACAGCCTCCGCTCTGCA
GTTTCATCCCTGCGCTTCCTGCCTGCTGACACCTCTCCTCCTCATTCCCTGGGCATCTCAAACT
CAGCATCTCCCTCCAAACCTGCCCTCCTTCCTCAATCCATGTGACAGTGACTCCCCGATCCCCA
GTGCCCAAGTCAGAAATGCCCTCCACACAAGCATCCTTTGCTCTCACCTAAGAAATGACTTACA
GTGTCCCAAAGCATTGCGCTGTTTAGTGCTTCTGTGCTTTTCCTTCTGCCTGCAACTCCCTCCC
CTCTTCTGCCCACTGCATCATCTAGCTAACTCCTATTCATCCTTCAACTCCCAGTTTGAGCACC
ACCTCTTCTTGGAAGCACTCCCTATCCCCATTACCCCCAGGCTCAACTGAGGGCCCTTCAGTGC
CCCCAGAGTTCTGTTCACCCAGCCCTGTGCGTTTTTTGCTTTTCTGCATGGGACTATGAGAACT
GGGTGTGTGGGGGTTGAACACAATTCTTGGCACATGGTCAGCAATGAGTGAATGTTTGATGAAG
GTGGCATTGGGGCCAAGTAGTAAGGATGAGAAGGGTTTTGCCAACTAGAGAGAAGTGGAGAAAA
GACCCCTCAGCCCTCTGTGTGGAGCACTGAGCTGTGGGTGTTCATGATTTTTATCCCGAGTGAG
CTCCAGGTGAAGGGAACAGCAGAGCAAAGGCCTTGAGATGGGACTTCCTTCCCCTCACTCCTTT
GCCCCAAGACCTGCAGAGCACAGGGCCTTGATTGACAGGCTGTGGAGGTGGGCCTTACCCTGTG
GGCAGTGGGGAGCCATACACGGTGACAGGCCAGGGTGGGGACACTGGATGGGAACCAGGGTTTG
ACTCTTTCTGAGTGAGTGCTGTGCAGACGTGAGGTCATCTATTTTTTCCAGTACCCGCTAGGTA
GCAGGCACTATTATTGTTCCCATTTTGCAGACAAGAAACTGGGGCTCAAAGAAGAGAAACACCA
CATACTAAGTTACACAGCTTGTCTGTGGTCGAGTCAAGACTCAAACCCATGTCGGCATCAGGGC
CAAGCCCGAGCTCTAAATGGTTCTCAGCCTCGCCAGCTGACCCAAGGCAGTTTCCAGTGGCCTA
AGGCAAAACTGAGGAGAATAAGGACGGGGTGGCGACTCTTTCATAAAGCTAAATTTATTCCACT
TAAAGGACTGTCTTTTAGTATGAGATGATGTCCTTTCTTTTATGAAATGATGGGCTGGGAAAAA
AATGTCCTTGCTTGGCAAAATAAAAAGTTGACAACCTTATGCAGTCCCCAAAGTGTTTTTGGAA
ATTTTACCGGTGGTGCGTGAAATCCCTGAGTCTGGGCGCCATCCCGGCTCCTCCCCACTGAGCT
GTGGAGCCAGAAGAGGGAGGGGTCTGGTAGGGACAGAGGGATCAGGGGACAGAGGAGCCTCAGG
TCCCGCACTTTGCAGTGAGGACCAACCCAAGGCTCTTTCCTAAGATTGGGTTGGGCGGGTGGGG
GGGTGGGGGGCAGATCAGCCAGAATCAAGGGCTCACCCCTCAGTTAAAGGAGCACTGGACCGGG
AGGCAGCAGGCTTGGGCTCAGCTCCTGCCTCTGCTTCCTGGAGGCTGTGTGATGCCAGGCAGGT
GACCCAACCTCTCTGAGGCACCAGCTTCCTTATACATAGAATGACAATTGCCATCTGTCCCTGC
TCACCTCACGGGGCTGCTTCCTATAGCAAGTGCTTGGTAAACTGCAAAGTGCTGTGAAGAACAG
GGGGGTTGTGGTGGTTTTACCTTTTTTTTTTTTTTTTTTCCTTTTGAGACAGAGTCTTACTCTT
TCACCCAGGCTGGAAGGCAGTGGTGTGATCATGGTTCACTGCAGCCTTGAACTCCTGGGCTCAA
GCGATCCTCCTGCCTCAGCCTTTCATGTAGCTGAGACCGCAGGTGCACGTCACGGCGCTAGGCT
AATTTTTAAATTTTTTGTAGAGAGGGGATCTTGTTATGTTGCCCAGGCTGGTTTCGAATTCCTG
TGCTCAAGCAATTTTCCCACCCTGGCCTCCCAAAGTGCTGAGATTACGGACATGAGCCACTGCA
CCCAGCCCTGGTTTTACTGTTCTTATCTTGCCATCAGAGGATCCCACTTCTCTAGGGTCCTGGG
CCCCTCATCTCACTTTCACTTTTCACTTGCACTGCTTTGAGCCCTGAGGAAGAGACATATGGGG
GAGCGGGGCAGGTGGAATGACACAGGCCCTGTAAAAGCAGGGTGGCCACACTAGCAATTCCTGT
CCTCAGGCTCCCCTGGAGGACAGCTCAGAGATGCCCAGGCTGGAGACCTGGGGAACTCTAGGAA
AAGAATGCACGAAGCTGGAGCCAGGCTAGAGTTCTAAGCACAGACTTTGTCACTGAGTAATAAG
ATTCATAGTCTAATCTCTACCAGGTATTGTGCTAAATATTTTTCACACTGCTTCATTTAATCCT
TCCAAGAGCCCTATGAGGTAGGTCCTATCATTATCCCCATTGGATGGAAGATGACACTGAAGCT
TAAAGGTGAAACACTGCCCTTGTCACACAGCCAGGAAGTGGTGAATGCCCAAGAGGACGGGAGT
TTTCTGGGCTCAGCTCAGACAACTGAGTGCCTGGAGAGGCCGAGTGTGCAACGATTCTGTGACA
TGAGAGGGTGGGAACGGTTTGCAGGACTGTGGTGGGGGGCCGAGGGGGTAATCAGTGCACATCA
GGGGCACCGGGTTGGGGTCGGAAGGCAAGAGACACGATCCTGCTGGCTAGCTTCTAGCAGTCAC
CTCCCTCTCTGAGTCTCAGCCTCCCTCTCTGCTCTGGCTCTCAATAATAACAAAGATAATACTA
GCAGGACCTTACTGAGTGCTTACCGTGGACCAGATGCTGCTCTGAGAGCTTGCCACGCCTTCTA
TCACTTTTTCCTCTCAATGACACTATGAGGTAGGTACTGTTATTATGCCTACTTTTCAGATGAG
GAAGTTGAGGCACAAAGAGGTTACGTGACTTGCCTGGGTACATGTAGCAGGGCCAGGATTCTAA
CCACAAGAGTCTAGCTCTATAGGCTGTGATCTTACCCACCTAACTCACCCGGACTATGTCTGCC
TGCTTCTAATGGGGGGTGATATTAGGAGAAGTTGAGCCTTAAAGTTCAAGGTCCTGGGCCGGGC
GCTGTGGCTCACGCCTGTAATCCCAGCACTTTGGGAGGCAGAGGCAGGCAGACCACCTGAGGTC
AGGAGTTCGAGACTAGCCTGGCCAACATGGTGAAACCCCGTCTCTACTGAAAATACAAAAAATT
ATCTGGGTGTGATGGTGCGCACCTATAGTCCCAGCTACTTGGGAGGTTGAGGCATCAGAATCGC
TTAAACCCGGGAGGTAGAGGTTGCAGTGAGCCGAGATCGTGCCACTGCACTCCAGCCTGGATGA
CAGAGTGAGACTCCATCAAATAAATAAATAAATAAATAAATAAATAAATAAATACAGTTCAAGG
TCCTGCTCCCACCCCGATTCTACCCTGGGGACTCATTCCTTCCCTCTCTCGCCCTTTCATTTGA
GAAACCTTCACTTCTAAATGAAGTTCAGCTGCTTATGCCAGTCTCCCCGGGCCAGGCCCTGTGC
CAGACTCTGGGGACAGAGCAATGAATCAGACCTTCCTCTGCTCCCTGGGGGAGATGGGCTGGGA
AGCTGGCAGTTACCAGGCAGGGTGATAAGTGCCACTGTCCAGGCAGCACGGAGTCCAGTGGGAG
CCCAGCACAGAGGGCCAAGCCCTGCCCCAATCTGGGCATGGCTGGGAAGGCTTCCCAGAGGAAG
AGGCTTAAGTTGAGACTGAAAGATGAGTAGAAGTAGGAGTTAGCTAGGTGAAAAGGAGCAAGGA
ACAGTGTTTCAGGCAGAGAGAATAGCACAGGCAGAGACCCAGAAGTGAGGCTGAACAGGGCATT
TGCAAAGAACAGCAAGAAGTCAGAAGAGCGGGATCCTAGAGGAGGCAAGAGGTATCTGGAGAAG
AGGCTGGGATGCAACAGGGCCAGGCTCGGCAGTGAGGACACCGGGCTGGGGAGCTGCAGCTTCC
TGAGAGGGTGATGGGAAGGAAGTGATGTCAGGAGTAACATGGCAGATTCGTGTTTTAGAAACTC
CTTTCTGGGACTGGCGAGGAGGATGCTGGAGGGGTAAGGACTCTGGCAAGGAGCCCTGGGGATG
CTACCAACTTGTCCCCCTTTTTCCTTTACCTTCCCCCCAGGGTCCAGCCTCCTGAGTGCCTCCT
CCAGAGCTATTGACCAACCCTGCTCAGGGCCTGGCTCAACCTGACCCGGAGCCCTAGGACTTTG
CCTATAGGGAAAGTTCAGCTGCTTATGCAAACTCTGGCTTGGGGGGAGATGTGTGTGGTTGAGC
TGGGAGCTGGTGGTGTGTGGGGGTGGCCTTGGAAGCAGAGAGGGTGGGTGCAGGCGCCGAGGCT
GTCTGGAAAGGGAGTCTGGGGATATAAGCTTGGGGTCCATGGGGGTCCCTAGAATAGTGGCCTT
ATAATGGCTCCAAGAGGGTACACTGGGATTTGGCCCAGATAATGGAGGGACACCCTGGCGAAGG
GGCAGAGTCCTGGCAGTTCAGCCAGCCCCAGCTCTGTCTTTTTCTTGAAGCTCAACAGAGTATG
GAAATCATTGGTCTCACCCAGCCCCCTCATTCTTCTGAGGGGGAAACAGGCTCAGAACAGGGCA
GGGACTAAACTCAGGTCAGCAGTAGAGCCCAGACCAGAACCCAGGCTCAGTCCAAGCATCTTAG
TTGTCTCCAATGATGATAAATAACAGTGAAAACCTTTCTGCAGAGCTTCCCAGGGGCTGGCCTG
GGCTTAGGCACCCTCTGGATGGTCTTGGGCAGACGTTTTTCACATCTCGAGCCTTAGCTCGAGG
TCCAAAATACTACCTGTACTGGGAAGGAGGTCCTCTCTCCCACTGACAGTCCACAAAGCCGTTT
TAGGCATGCTGGACCCATTGTGGGCTTTACTTATTGTTTGTTCAATGAATCCCACTGAATTCAT
GTAACAACCCTGGAGGAAGATACTATTATGCTATTTTGTGCTGAGGCTCAGAAAGGAGAAGTGA
CTTGCCCAAGGTCATTCAGCTGAGAAGTTGCTGACTTAGGGCTGGACTCCAGGGGTCCAGATGC
CTGTCTAGGATCCCTGATGGACACAGCCCCATTTTTGAGCCTGCGCTCTCAGCGAAAATCAGTT
GGTGTCTCAACGAGACCCATCGTCAGCTGGGCAGGGTGTGTGTATATATGTGGAAGCTGGGCTG
GGCTGCTGGCTGGAACTCAAGCCACACCAACCCCTGTGCCCCTGTGTTTGGACCTGGCTGCAGC
TGCTGCCCGTGGGGGAAGGGGACCTTGCCACTTGCCCTCCTGCATCAAGGGTTTTTTCTCCTTG
GCCTGGCTGCCTGGGCAAAGGAGCTGGCTGTGGCATGACCATGTGGGCACCTGCCAGCCCCTCC
CTTGTTGGGGTCTGGTCATCTAATGCCCTTCACATGACAGGCATGGGGTGGGCCCTGGCTGGGG
AGAGGGATTTGCACTCTCCTAATCCAAGGGCTGCAGCCCTCCCTCTGTCTTGGCCAGGGCCGTG
GGAGAGGTTTGTCCTTGCCCCATGCCCAGCAGCCCCAGCTCAGATCCCTGGCATACACCCAGTT
CCTCTGCTTGGGGCCTTCCCCTGTCCTGCTTCTGCTCCCCACCCTCCTACTCTGTGAGCAGAAT
CAGGAGCTAGGGGGCAATGCTGGGGCATTCAGGACTGATGGAGGTGCAGTGCTACATAGCATGT
GGGACTGAAGGATGGGGGCGATGTCAGGGAGGTTTAGGGCACATGTTGGGGCAAAGTTGAGGGA
AGATGATTGGGGTGCAGAGCAGGAGTGTTTGGGGCTCATCCTGGGCCACCCCTTCCTGGAAAAA
TTTGGCTACAAGTCAGGGAGGCAAATGTGTGGGCCATGCCCCCCCCCTCGCTAGGCAGTAAACA
CTGCCGTCGCCTGGGAGACAAGAAAACATCTTGGTCCCCCCACGGTTGTTTATACCAGGACTCC
CTCTCCTTCTCTGGCCTGGTCTGGCCTCTCCACTCCTGAGCTGGGCTACCTGAGTTGAGGGTCC
AGCCCCCGGTCATGGCAGGAGGCCCTGGCAGCACGCCCACTGGCCCCCACCAGGGACTGAGCAC
TCACCACCTCCTGGTGGCCTGTCCCATTGGAGGCCCTAGGTCTTATTGATCAGAAACGTGCTCC
CAAGCCTTGGCCTCCACGAGGGAGGCCTGGGACTGTGCCCTGGATTTGCTCCAACCCACTGCCT
GAATGCAGTCACTGGCCTCCCGGTAACCTCAGCTTCCCATGTTCAGTAGCAGGCAGGATCTAGA
TTAGAGCTTTTCAAACTGTTTCAAGTCATAGATCTGGTTCTTTGAATGAGACCTGATACAGAAG
CACAATATATAAAACAGATCAAAGTAGGGCTACTCTGGGTGGAGTCACGGGTTGGGGCCCAGAA
TTCTACCCACTCTATGCCAGCCTATATGGCCCTGGCATATCAACCCAGAGCCTGTACATGGTCC
TCCTTGCTCTAGAACACATTCCAGGTAACCCTGGAATTCCCTGGCCAAATACTTATGCCTACTT
CCAGGGTCTGCACAGGCCCTTCTCCCAGGGGCTGTCAGAGCAGCCCTAGGCTCAAGGACGGCTG
TTTGTAGTGGGTATAGCAAAAGCCCGGAAGAGCAGGCTGAGGCACCCCCAGGAGTGTACCCAAG
GCCCCTCCCAGGGAGGGATGGGCCCAGTGTGGGAAGAGAATCTGAGGATCGGAGGGTAGCAAGG
GGCTGGCTGTCCCTTCCCTGCTGGATTCCAGCATGGGATTCCAAGGCATCCAAGAACTAAAATT
CAAACCTGGTCTTCTAGGTCATTATGAAGGTATATGTGTCAGGAAGGATAGAGCAAATTTTATT
TAAAAGTTTGTTAACCTGATTGAAACTTTTAAATATTTAGACTTATGGTATGTGGGTCTCCATT
TATACTCTCTCCCCAGTCCTGCCAGAGTTAGGGGTGAGCTTGCATCAATCCTCCTTCCACCCAC
CCACCTACCTCTGCAGCAACCCCAAGACAGCCTTACCCAGAACTCTCAGGCTTCACAGGACAGT
GTGGAAGTCCCACTCGCTGAAACTCAAGGCCCTGGTGACTGCATCTTTCTGTTCACTCCCCAGA
TACTGTCTGAGCATCAGCTGGGGCCAGCCTGGGGGTTGTGGAGGAGCCAGACTGGCCTTGCCCT
AGAGGGATGGATCTCAGTGAGGAGTAAGCGGGTAGGAACACTCTCCCTCTTGTAGAATAGTGTG
AGAAGGGGTGCCTGAGGGGGCCCACAGGGGCCCTGGAATCCTAACGAGGGGCTAAAGAAGCTCC
TCTATTCAAAGCCGATCATGGATGGATGAGGTGGAAGAGAGACAGCCCAAGAAGGGGAGACAGT
ACAAAAGCCACCAAGGTGGAAATGTACAGGGAGTGGAGAAGTCGAGTGTCGCTGGTGCTTAGGA
TGTGTGTACAGCCTCAAACGCTGGTCTAAGGAGCTTGGGTTTTCTATTTTAACAGTAAGAAGCT
GTTGTAGGATTGTAAATGGGGTAGGGGCTGAGGAAGAGGCATTCAGACTGCAAGGTAAGTGGAC
TGGAGGTGGGGATAGGGGGCTGGAATTGTGGTGGTCAGTGAGAGGCTGGCTGGGGGGAAGGGGA
ATGGGGGTGAGTCCTGGGCTGACCAGGAATGGGACTTGAGGGGCTAGGAAGAAAGAGGGGATCT
TAACTCTGCTTTCTGGGACCACATCTCCTATCTCCTCCTCCTTTGTTCTGTCTCAGTTTTTGTC
TTCTTCTCCTGCTATTCCACTGCCCTAGGTCTCCAGGCTGGGGAGAGGGGCACTCACCCTAAAC
CCCCTCTCCAAAGCAGGCCACTTCACACAAGTGGCCAGGCAAGAGGCCGCAGTTGTATAAGAGG
CTTTTCTCAGCTGGCTGGACTACTCATTCGTTCATTTATTCATTCATTCACTCAACATTTATTG
AGAACCTACAATGCACCAGGCCCTGCACTAGGTTTTGGAGAGAAAGTAGGAACAAGATCAAGTA
CCTGCATTCATGGAGCTTACATTGAGGGGGGCGGGAGAACCAGGAACTGTATCTATCCCCGGTG
TCTACCATCTGGCACCTGTGCCTGGGCTGGATGCCTGGGAACAGGGACTCTTCCCATTACCTAC
TCATTTGTTCCAGCTGCCCTGTGTCAGCACTCACCTCTCTGGACAATGACAGAGGAGAAGGGGT
CCCATGCCCAGGATGCCAGCCCCAGGGAGCACCTGTCTCTGTAAGAACAGCCTGGCCCTCGGGG
CCAGGACCTGGGCTCAGGCCTAGTTCTTCCTACTCACTCCTGACTTTGAGCCCTTTGCAAGGAC
CCGACTTTGATTTCTTTATCTGTCAGGTGGGATTTGGGGAGGTCCTGAGGAGGCGAGGGGACCA
GAATACTGGACCTCAGCTCCAGTATTCTCCCTTGGTGGGCAACTCCTTTGGCTATGATGGGAGG
GGGAAGGGGGCTTGGGACTCAATATTATCATCATTACCCATACAAGATAGTAATAGTTGCTACC
TATTGTGTAATTTATTCCGCACTATCTGTATGGTCGGTGTGTCTTCTCTCCCCATTTTCCGGAT
GAGGAAACTGAGTCTCCGTAAGGTGAAATGACTTACTTGAGGTCACACGTGAAACTACCTACTC
CAAGAGCCCTTTAGGATGGTGCTGTGAGGTGGAAGGGCGAGGCCGAGGCGGCGGTGGCGTCGCG
TCCCCCCTCTCCGCCCCTGGCCTCGGGGACGCGGCGGCACCTTCACACTTTCCGCTTGGCCCGC
TGCTCGCCTTTCAGGCCGCCGCGTTTTCAATTGTTAATTTGGAAACGGAAAAAGTAGCCGGCCG
GGCGGGGGAGGCCGCGGGGAGGTAATCGGAGCCGCAGCACCGCCCCGGCCCCTCCCGCTCTCGG
GGCCTGGCATTGGCAAAGCCCCGCCCCTCCCAGGGACGCAAGAGCCCCGCCCACCATTCCCCGC
CCCCGGCATGCCCCGCCCATTTCCGTAAGCCCCGCCCTCGCCGAGGCGGGCTGGGGGCACCTGG
GAGTGCCGAGCAGTGGCGCCCCTGCTGAGGAGAAGGAGCCCGGGCGGGGGAAGGGGGCCGAGGG
CTGTGCTGGGGGAGGAGTCCCCCAGGAGCCCTCCCCGCAGGAACCCGTACCTCTCCCGAGAAGT
CGCGCAGGGTGTCTGCTTCCCTTGTCCCTACGTGAACCCAAGCCTTTCTGCAACCCCTCTGTAG
GTTCACCCAGGGGAGACCCCTGCCTCCAGACTGCCGGACCAGGGATCATTGGTCCCATTAGAAA
GACGAAGAAACTGAGTCCTGAGAGGGACAGTTAACTTGCTAAAAGTCACACAGCCAAGGCAGAG
CAGAGCTGAATTCAAGCCCATTCTTTTGAGTGAGATACATTTAGGGACTGTCTGCCTCATTTAG
AAGAGGAGGGGGCATCAGGACCAGAGATACAATTTGTCCCCTTCCCCCTATCTCCAGCACGGTT
TCTGTGGTTAGTAAGTTACTGGAAGTTCTGCTTATCATTATTCAATTATGGGAGGGTTTTGGAG
GTAGAAGGAGGTCCCTCTAAACTTTCCATGTAAATGAAATGTAAAAGACCCTCTTCTGGGGACT
CCCAGAACACAGAAGTCCCTGAGGACTGGCAGCTTCAGGAGCCGTCCACGGCCTTGCTTCCCAT
TAGGGAAGCTGGAATTGCCAGTCCCAGATGGATCAGCAAAAAATAGGGCCCTCAGAGACTCCCA
CCCAATCCCTTCCTCCCACTGAGGAATAAGCTGAGACTCAGACACAGTTTCCCAAGTCTTCAGC
TGACTGGTGGCGGAGTCAGGAGACAGAACCCACCGACCCAGCTTTCTAGCTGTGTCCACGCCCT
TCTGCTTCTCCCTCTGCTGCCCCCCAATCCTGACACCTCTCTCACAGCCACCACTCAGGATCCT
GCCTCCATCAGCTGGGCCTGCAGGCTGGGCAGCCTTTCTCTTTACAGGCGGAGGAAACTAAGAA
GAGTATCTGCAGATGTCCTCCCAGCTTCCAGTTAAAGACCCTCCCAACCACCCTTCCACCTTAG
CTGTGGGTCAGGCCCAGAGAAGCTGCGCTCCTGGCCTCGAGTCACACAGCAAGCCTTTTCCAGC
TTGCAAAGCCCACTGGATTCAGTCTGGCTGGTCCTGGATTTGGGGTTCCCACTGGGAGCATGGC
TCTCAGGGCAGCTGTAACCAGATGCCCCAGGTGTGGCCTGTGAGTTTGCATGCTGCTTTGCTTA
TTAGTAACAAAGGCATTGAAACCCCTCTTCCTCATTGTGTCCCCAAACCACCCACTGGGTGGGG
TCCTCAATGGCTGAGTCTACAGAACTCCTGGGCTGGGCTCAGTCTTGGCACCTGAGCTCCCCAG
GGAACTCTGCCCTCCACGGTGCTCCTCTTCGACCCTGTCAGCTCTTGGTGCTCTCTCTGCCCTG
GAAGTACTGAGAACCCAGTGGCAAGGACTAACTCTTTCCCTTGTCTTGGACTCTTCCCTCCCTC
TCCCTCCCCCAATATAGTGCACAGGTTCTGCTGACTCAGAGGACAGAAGGCTCCTTTGAGGTTA
CCCTGACCCCTGCCAGGTTCAAGTAGCTGGGAAACTGGGCAATGCTTGAACCCACTGCCACAAA
GTCACATGCAGCAGGAAGGGCAGGGGCAGGTCCCATCTTGGCCCCAGGATGAGGGAATTTTTGA
GGTGGGAGTGAGAGGCAGGTGCCTGAGTCCTTCTACAGACAGAGGAGAAATCCAAAGAACATTG
CATTAGGAATCAGGAAATCTGGGTGCCAGGCCCAACTCTGTCTCTGATCTACTGTATGATCACA
GGTAAGCCAGGCCCCTCTCTGGGACTCAGTTTCCCCATCTATAAATGAGAAGGTTGGTTAATCT
CTAAGGGACCTTTCAGTGCCCAGATATAGCCAGTATCTGGTCATATCTTGCCACTTCCGCTTCC
CCTCATACAAGTCACCATCATCAGCTGGTAGTGGCTCATGCCTGTAAGCCCAGCACTTTGGGAG
ATGGAGGCAGGAGAATTGTTTGAGCCCAGGAGTTCGAGACGAGCCCGGGCAACATGGGGAGACC
CTGTCTCTACAAAAAATAAATATAAATTAGTCGGGCATGGTGGCACCCACCTGTGGCCCCAGCT
ACTCAGGGGGCTGAGGCTGGCGGATTGTTTGAGCCCAGGAGGTTGAGGCTGCAGTGAGCCGTGA
TTGCACCACTGCACTCCAGCCTGGGTAACAGAGTGAGACCCTGTCTCAAAAAAAAAAAAAAAAA
AAAGTCACACAGGGTGAAGTGGCATGTGCCTGTAGTCTCAGCTACTCAGGCAGCTGAGGTGGGA
GGATCATTTGAGCCCAGGAGTTCTGGGCTGTGGTGAGCTATTCCAATCAGGTGTCCACACTAAG
TTTGGCATAAATATGGTGACCTCCTGGGAACAGAGGACCATCAAGTTGCCTAGGGAGGGGTGAA
CTGGCCCAGGTCAGAAACGGAGCAGGTCAAAACTCCCGTGTTGACCAGTAGTGGGATCACACCT
GTGAATAGCCACTACAATCCAGCCTGGGCAACATAACAAGACCCCATCTCTTAAAAATAAAAAT
AAACAAAACAAACAAACAAACAAAAAGTCACTGGCATCTCTTGCCAGGATTATACTTTCCAACT
CACAATGGGGCAAACGTCATTGCTCCCTCCTCCCCTCTCCCCCACCATAGTCCGTTCACTCAGC
AGCCTGTGTGATCTTTTTAAACATAAGGAAGATTGAGCTACTCCCTGCTCAAACTCCCCATCTC
ACTCAGAGTAAAAGCCAAGATCCTTACCATAGCCAGTAGATGGTCCGCTTTCCACCTCCCCTGC
CTCTCTGCCCTCACCCCCCACCACTCTCCCCTTGCTCATTCCACTCTGGGATCACTCCTTTCCT
GGTAGTTCTGGAACACAGAAGGCACCCTTCTGGCTCAGATGTGTTGGATTTGTTTTTCCCTCTG
GAGGTGGGATGGGGGTTAAGGGAGCATGAGGTGGGGGCTCTGACCTAAGCCTGCCAGTCTGAGC
TCATGCTCAGACACAGCATGAGTAAAGGTGGGGAGGGGAAAAGAGCGCGTTTGCCATTGTCAGG
GACAGAGCTATGATAATGCAGTGCCAAGTGTCAGGTTGGGTACCGGCTAGTGAAGAGCAAGTTG
GCCTGGTGGGTGGGGCTTTCCTTGCAATCATGCTAAGGGGTTTGGGCCTGGGCCCACAACTCAG
TGGATTTCACACTTTTTAAAAAAACAGCAAAGCTTTTTGTTCACATGAAATTTTTTTTTTTTTT
TAAGATGGAGTCTTGCTCTGTCGCCCAGGCTGGAGTGCAGTGGCGCAATCTCGGCTCACTGCAG
GCTCCGCCTCCTGGGTTCACGCCATTCTTCTGCCTCAGCCTCTGGAGTAGCTGGGACTACAGGC
GCCCACCACCACGCCTGGCTAAGTTTTTGTATTTTTAGTAGAGATGGGGTTTCACCGTGTTAGC
CAGGATGGTCTCGATCTCCTGACCTCGTGATCCGCCTGCCTCAGCCTCCCAAAGTGCTGGGATT
ACAGGCGTGAGCCACCGCGCCCGGCCTCACATGAAATTTTTACGCCAAAGCCAGCATGTAAAAC
TGAGCCACCCGAATCTGCACGGAGCTGCTCAGTGGAACCGAGGGAAGGTTTCCACTAGCCATCT
TGCTTGAGTTTCTCAAATCCTGGCTGCCTAAATTCCACCCCATGTTTCCCCTTCCTTTCAATGG
CATCCTGCTTGGGAGGGCCCACACCTCCCTGTTTGAGAAGTCAGCTCTGTCTGGCCAGTCCCAA
CAGATGGATGCCCCTGTGTCCTCTTTGTTCCACTCTGGCTCTTGTCAACACATTGCTCAGCCCA
CTGACCTGGTGCAACAGGTAGGCAGGCTGGCACGGCAGAAGGAAGCAGACAGAACAAGTCGGAA
GGTTTGGGGCTGGTGCAGGTGGGAGAGGAGGAAGCTATTCCTCATCAAACACCTTGTCTAGAAG
ACACTGCCTTTCATGTCCCGTGGGACAGAAACCATTCAAGCTGGCTCAATAAAAACTGGCTTCT
GTACTATTACATTTGGGATAAAGAAAAAGAAAAATTGGCTTCTGGAGGTAGAGGACAGATATGG
TAAGGAAAGAGAATTCTTTAGAGGCTTCAAGGCAGAAAGCACATTTTGGATTCATGGGATAGAG
AGCAGGGGGATGAGGTTCCAGCGTAGTGCAGTCTCATGGCCCATCTCTCTGCACCTCTGCCAAC
TTTCCTCTGTGGTTCTTAGTTCCATTCCTGCGAAAGACAATCCGATTGGCTCAGCCCAACCTAT
GGGTGGGCCCTTCTTGGGTCAGTCTCCAGCTCTCCATGAATCTGTGGCGGCCAGGAGAGTGCTG
TGGAGCCAACCGCAGGGCTGTCATGTGTCGCTCTGCAGTCTGGGCGCCACAAAGGGGCCGGCTG
AGAGGGCTGAGGGGTGCTGGAATCCAGCCTATGCCCAGGGGTGGGGCAGCCCAGGGGAAGGGAT
GCCTGTGCTAATGGGTCCGTCTAGAGGGGTCAAGTTTTTATAACTTGTCAGGCTAACGGGAATG
CTTTTTTTCTAAGCCATCCTCCAAGAGGGGGCATTTTTTTCATAGTTTGTTCTATGTGCTGGCG
GCTGCTGTCCCTCCAGGGACAGCCTCAGGGAAACTCAGCTGAGGGCCAACTCTCTCCTTTCTAC
CCCACTGCTGGAGAGTCACAAGGCGGAAGGGACTTTGGCCATTACTGAGTAGTGCTCCACCTAC
ATGTTGCAGACAGGGAAACTGAGGCTCCATCAGGGCCCCATTGCAATTTCTAAGCCCCAGCGCA
AGCCTCTGGCCCAGAGAAGCAGCAGCGGCAGTGGCGGCGGCCCTGGTGTGGGGCCCTGGGTCAC
GTGCTCTTGCTCCCTTTGCCATATTTAGAATCGCTGGATCAGGGGAAACTTCTCCTCCCAGCCC
CTGAGGATTCTTGGAAAGAGCCTCGCTCTGAGGCCTGGCTTACTGCCCCTCCCCTTATTCCCCT
GCAGGAGAAAGTAAGTGCCTGCTCTCTCTAGAAGAGTCTGGGGGCCTCCAGGCTGCCCCCCTTG
TCAGGAAGTGCCTGTCAAGTCTAGCTGAAGTCCCTTCTTCGGTATCAGCTCCGGTTTGGGGTTT
AAGGAGCCCCTTTCTTCCAGAAGGTGATGGTGGCCATAGCTTCTGCCCTCTAGGGACCTTGGCT
GAATGGAGGACAGACTGGCCTCAGGGTCCTCCAGCTGAGGGGAGACAGAGCCCTGCCTTTGGGC
CCTGGTCTAGGGGGCAAGGAAAGAGTCACGCGCTCCCCAGGCCAGATGCACAAATCACTTGAGC
TTGGGGGTTGGAGACCAGCCTGGGAAAATAGCAAGACCTTGTCTCTACTAAAAATCAAAAAAAA
TTAGCCAGGTGTGGTGGTCCCGGCTACTCAGGAGGCTGAGGCAGGCAGATTTCTTGAGCCTTGG
AGAGTGATGCTGCAGTGAGCTATGATTGCACCACTGCATTCCAACACAGGCAACAGAGCAAGAC
CCTGTCTCAAAAGAAAAGAAATCAGGGAAACTGCTGGTGGCTGGGCAGTCCCCAGACACTGGCA
GGGCTCAGTCTGGGAGGGACGCTGGAAAGACGAGGGAAGGAAGGAGGCTCTGGAGGAAGGAGGG
GGCAAGGCCTGGATCTGTATTTACCTTGGCCTTGGTGGATACTTGGGGGTGGGGAGCGGTCCTC
TTCTCACACAGGCTGCTTCCTAGTGGATAATCAAGCCTTAAAAACAAACAGCAACAAAAAACCT
AAATAAAACCCTGAAATGCATGTGTTGAGTGCCTGTGATGTTCCAGGTCTGAAGAGCCATCCTC
GCTGCTGAGGATAATGGTCCTGTGCTCCCATGGGACCCCTCTCCAGGCGTGGTCTTTTCTCCCA
CCTTCCTCTCCCAGCTCCATACCTCCTCCATCTCTTCAGATCCCCCACCCCACCCTCCTGCCCA
CTTCTGAGAGTTGGGCCTTGCCTCTTCCCAGAGCAGTCCCCAGTGAGTAGGGGCTGTCGGCCTC
CTCCCTTCCCACAGCCTCCTCCCACCTACATGCCTTCCTGTCCCTGTGGAAGCTGGAGGGATCC
TTCCTACTCCACACCAGCTCCTCCCTGGCTCTGGATCCCAGCCTCCCATCTTCCTTGGGGACTT
CATTCCATTGACTACTCACTCTGTCTCCCCGCATCTTCAACTTCTCCTTCTTGATCTCTTGGCT
CCTTCCACTCTGGCTCTCTCATCTTAAAAGAAAAGAAAAAGATTCCCTATACCCTGCATCCTTC
TCCAGCTACGATCTCTGATCTCTTCTTTGCAGTCAAACATCTTCAAATTGTTAAACCTACACTT
ACTGTCTCTACCTCCTCACTGCCCCTCCCCTTTCTCACTTTTTCTGGGCCTGTTCTGGTCTTCC
TCTCCTTCTGAGAGAAGGCTGCCCTTGCCAAGGGACCCAGTGACCAATGTGTCACCAAATCCAG
AGGACATTTTTCACGCCTTATCTCACTTGACCTCTTGGCAGCATTTGACACTGTTGTCTACTCC
CGCTTTGAAACATGTTCTTCACGTGGCCTCTCTGACACTTCTCTCTTCTGCTTTCCCTCCCAGC
TCTCTGGCTATCCCTCCCAGTCTGCGTAGAGGGCCTCTGTTCCTGCTGCACCGCTGGGGCTCCA
TCGGGTCCTCCTCTAACTTTGCTACAAGCTCTCTGGACTGTCTCAGCTGCTCCTGTGACCTCAG
TCACCACCTCTACCCTGATGTCCCCCAGATCTGCATTTCCAGCCGGGTCTCTCTCTTCATACCC
ATGGAGTGTTTGCCCAGTGCCCATAGCCCTCTCTCTCTCTCAACATGCCCACCACCCAACACCT
GCTCCTCCAGTGGGGTCTCCCCCGTCCCATGAAGGCACTCATGGCACCTTCATCCATCCAATGC
CCAAACCAGAAATAGAGAAGTTGTTCTCCTTCCTAGTTCCCGTTTCCAGTTAATCACCGAGCCC
TACTTCCTGCGGTGTTTTCCAACCCATCCACTCCTCTTCCCTGCTGCCACCACCCTGGGCCAGG
CCACAGTCATCTGTCGTCTGAGCTATTGTGGAGCTTTCTTGGTCTTTCTGCTGAGTCTTATCTC
CTTTGATCTATTCTGTGTACTTCCCCAAGTGGTCCTGAGATGCAAATTGGACTGTGTCATTTCC
TCTCTTAGAACTCCACAATTGGCCAGGTGCGGTGGCTCACGCCTGTAATCCCAGCACTTTGGGA
GGCCGAGGCAGGTGGATCACTTGAGGTCAGGAGTTCAAGACCAGCCTGGCCAACATGGTGAAAC
CCCGTCTCTACTAAAAATACAAAACTTAGCCGGGCGTGGTGGTAGGCACCTGTAATCCCAGCTA
CTCGGGAGGCTGAGGCACGAGAATCTCTTGAACCCAGGAGGCGGAGGTTGCAGTGAGCCAACAC
CACTGCACTCCAGCCTGGGCGACAGAGTGAGACTCCGTCTCAAAAAAAAAAAGAACTCTACAAT
GACTCCCCATTGCCTTTGGGATCATGTTCACAGTGCCTGAGAATGCTACTCAAGGCCCCTGGGT
CTGGCCCTCTCTGGTTTTTCCACTGCCCCCTTCACTTTAGGCCACACCATCCAGAACTGCTGGC
CGTTCTGGGCTGCCTCGACGGCCACATTCCCACTGCTTGCACATCCTGCTTCCTCTGCCTGGGG
CACCCCGACCCCTGTCCAGTTACCTCCTCCAAGAAGTCTTCACTGATCCCTCCACTTTGGTTGT
GCGGAAGGCTTCTTGGGACTCTCCCCGACCCCTTGAGTACACTGTCATGGCCTCGTCCATCCCG
TCACCACTGTGTCATGTTCTGTGTTGTTAATTCCTTGGGACCTGGATTATTCATTTCTGGTTTT
ACAATAAACCTGGCTGAGTGTAGGTGTCTGAAGTGAATATAGCCCAGAGAGGTCAGGTGACAAC
CTCTTTTCTGCTGTGAGATGCCCTGCCATCTTTCCTACCCCCATCATATCCCCATCTCTCTGGC
CTGGCCTCCCAGCAGCTGTCCCTCCAGGGACATGTTGGACATGTCGAGAGAGAGAGCCGTGGAC
ACTGGGCAAACGCCCAGTGGGTATGAAGAGAGAGACCTCAGCTGGATCCAGGGACATCCCCAGA
GAATCTGGAGCTGAGCTGATGGCCGATCCTCTCCACCCCACTGCTGGAGAGTTACCAAGCTACA
GGGACCTTAACCATCACTGAGTTGTCCCCGACCTTTGTGTGTGTTTCTGACAGGGAAATTGAGG
CCCAGAGCATTAGTAGGGCCCGGTGGTCCAGGTGGTCTTGGGCTCAGGTCCTGCGCTTATGACT
TTGAACAAGTCATACCTTTCTTTTCTCATTTGAATAACAGCTTTATTGAGATATAATTCACATA
CAGTAAAATTCCTCCTTTTAAAGTGTTCAGTTCAGAGGATTTTAGTGTATTCACAGAGCTCTGC
AGTCACCACAGTATACGCCTCTGAACCGCCCTCTCCTTATCAGGGTGATGATGGTACGGTTCCA
TGGGGTCACTGTGAGAACTCATTAAGAACATGCATTTAGAGGGCTTGGCACAGTGTCTGGCCAA
TAGGAAGCCTTTGGCCAGCAGGAGCAGTTATGGTTATTACTTCAGGTCACCACATGAGAGCCAC
CTCCCCAGCAGAGCTTTCCCCCTCCTGCCCTGTGGCCGCTTCTGGACAGTGACTTGAGGAGGTA
TAAATGTGGAGAAGGCGGTGATTGCAGTTGTTTAAAAGCCCTGAGCTGGCTAATAATTGAGTCA
GCTGCAACTGCTCCCATCACCTAAGCCAGTGATTCTCAAAGTGTGGTCCCCATAACAGCAGCAA
TAGTATCACGAGGGACCTTTGTAGAAAGGCATATTTTCCACTTCAAACTTACTGAATCAGACAC
TGTAGGAATAGGTCCCAGAAATCAGTATTTTAACAAGCCCTCCAGGTGACTCTGACACCCACCG
TAGTTTGAAAACCACAAATCTAAGCAAACCATTCACTTTTTCATCTCTAATCCTCTTGCTCCCT
CCTGAACGAGTGGGATAGTCATGGGATGGGGAGATGGGGGAAATGGAGAGGAAAGGTTGGATAA
GCCTTGTGATCAGACCAGCTGGGGAGAGCCAGCCAGGCAACACCCGCCTGTCTCATTCTGCCTC
CTGGGCTGGGCAGGGAGAAAGAACATGGGCCACAACTTGCAGGCAGACATGATGGGCAAAGATG
TCCTAGAAAGTGGCCGCTAGTCTGGCCTGTCTGCTGGGGAGATTAGAGAGGGCCCAGGCCAGCC
AGCACCCATGTTTCATCTATATTTGTATAGATGGAGAAACTGAGGTCCCAGAGGGGGCCAGAGA
GAATCCTTAGAAAGTCCTTTGTTGGATGAATGAAGCCACACCCTAGTTGTGGCAGGCATGAGAC
CCCAGCTAAGGGGCTCCTTCACCTTGTCTCCTCTACCCCTGACCTCCAGATACTGATCTCTCTT
CTGCTGTCCCTGTGTGAGGACCACCCCCACTCCAGGAAGGCCAAGGCAGCTTGAGGGTCAGCCT
GAGCTGGGGTTCTAGCTGCAGCTCTGCCACTGATTCACTGTGTGATCCTGAACAAGTCTATCCC
TCCCTGAGCTCTATTTCCTCAGCTGGAAGATATGGATAATTATTCAGGTGCCTGGAACACAGGA
TCTTTTCTTTTTTTGAGATACAGAGTCTGGCTCTGTCCCCCAAGCTAGAATGCAGTGGCGAGAT
CACAGCTCACTGTAGCCTCAACCTCCCTGGCTCAAGCGATCTTCCCACCTCAGCCTCCCGAGTA
GCTGGGACCACAGATGCACACCCCCATGCCTGGCTAATTTTTGTTTTGATTTTTTTTGTAGAGA
CAGCATCTCACAATGTTGCCCAGGCTGGTCTTGACCTCCTGGACTCAAGCAATCCTCCCACCTT
GGACTCCCAAATGTTGGGATTACAGGCATGAGCCACCGCGCCTCGTCCCAGGATGTTTTCTATT
AGTCCAAGTATATCCCTTCAAATGTAATGAGAGTATCAAGGGTATAGAAACTCTTAGCCAGTGG
GTTAAAGCAGGGAGAAGTGAAGTTTGGGGGCTTTTTAAGCAGCGTCCGCCAAATGGAGATGGTC
AAGGTCAGAGGCGTTACTTTTTAGGAAAGACATGGGGCAGCCAGAGGAGTCAGGGATGGATGTG
CTTTGGGGACCTCTTCAGTGGGTACAAACTGGAGGCTTTGGCTTGGTAACATGGTGTTTTGATG
TTTGGTTACAGTGAACTCCTGCTATTCATTTACTTAGTCTTTCAATAGTGCTGTGAAATCAATC
AAGCAATCGGTCAGTCAGAATAAGGGGCAAGAGAGTGGAGATGAGGCCATTCTTTCAGAGAGGG
GATGGCTGGGGAGGCCCCTCCAAAGAAGTGGCATTGGAACAGACCTGGGTGAGGCAGAGGAAAC
AGTAAAGCAGGTTCAAAGCCTGGAGGTGGAAATATGTTAGGTGTGTTCCAGGACTGGCAAGGAG
GCCAGAATAAGTGGGGTGCAGTGAGCCAGCAGGAGAGTGAAGAAGGTCAAGTTTGGAGGCGGGG
GTGGAGGCACAGACCTTGCAGGGCCTTGTTGTCAGTGCCGAGGAGTTGGACTTTCCCTCTCTAA
GTGCGATGGAAGTCCGACGAGAGTTTTGTGGAGAGCGATGGTTTCCAGCTGTGCATTGTGGGAA
GATGACCCTGGCTGCGTTGAAGGGAGTGGTCACATTCAGGCACAGTGGAGGCAGGGAGGCCAGG
TAGGTGCCAGATGGTGGCGGCTTGGTTGGGATGGTGCGACCTGGCCTGCCCAGGGATAGATTCT
GAAGGTAGAGCCAATGGAATTTGCTCAGAAGGGGATGTGCAGGGGGAGGGAAAGGAAGAATGAA
GGAGCCTGAGCCCTGGGGGAGCCGTGGTGCCGTTACTGAGATGGGTAGGCTGGAGGTGAGGAGG
ACTTGAGGACAAATTGAGAACTGGTGTTTGGAGGTGTTGGGTTTGAGAGGCCACCAGACATCCA
AGAAGAGTCATTGAGCAGGCATTTGGACACACGAGCTGGACACCTGGGAGAGGCTGCCACATCC
TCACTCCTGCTAAATGGCAGAGGCGACTGTGGTCAAGGGGTGGGGCAGGATCCAAAGTGGGCTT
TTCTTGTTTTTGTTTTTGTTTTTGTTTTTGTTTTTGAGACGGAGTCTCACTCTGTCGCCCAGGC
TGGAGTGCAGTGGCGCAATCTTGGCTCACTGCAAGCTCTGCCTCCTGGGTTCATGCCATTGTCC
TGCCTCAGCCTCCCGAGTAGCTGGGACTACAGGCATCCGCCAGCAAGCCCAGCTGATTTCTTGT
ATTTTTAATAGAGACAGGGTTTCACCGTGTTAGTCAGGATGGTCTCGATCTCCTGACCTTGTGA
TCTGCCCACCTCGGCCTCCCAAAGTACTGGGATTACAGGCGTGAGCCACTGCGCCCGGCCTTTT
TTTTTTTTTTTTTTTTTTTTGAGATGATGTCTTGCTCTTGTTGCCCAGACTGGAGTGCAATGGT
GCCATCTTGGCTCACTGCAACCTCCGCCTCCCAAGTTCAAGTGATTCTCCTCCCTCAGCCTCCT
GAGTAGCTGGGATTACAGGCGCCTACCAACACGCCTGGCTAACTTTTGTATTTTTAGTAGAGGC
GGGGTTTCACGATGTTGGCCAGGCTGGTCTGTAACTCCTGACCTCAGGCTATCCACCCACCTCG
GCCTCCCAAAGTGCTGGGATTACAGGCATGAGCCACCGCACCCAGCCTGCATTTTAAATTTTAT
ATTAGTTTGTTATTACCGAAACAACCCATGTTTGTTCCAAACAATATATTAGGAAATACTGGCT
GGGCGAGTGGCTTACATTGCCAGCTCTGGGAGGCAGAGGCGGGAGGATCACTTGAGCCCAGGAG
TTTGAGACCAGCCTGGGCAACATAGTTCAACCCCATCTCTACAAAAAATTTAAAAATTAGCCGG
GTGTGGTGTCATGTGCCTGTGGTCTCAGCTACTCAGGAGGCTGAGGTAGGAGGATGGCTTGAGC
TCAGGAGGTCAAGGCTACAGTGAGTCGTGATCATGCTACTGCACTCCAGCCTGGTTGACAGAGT
GAGACCCTGTCTCAAAAAAAAACAAAACAAAACAAAAAATAGAAAATACAGATAAGCAGAAAGC
AAAACAAAAGCCAAATCACTTAATTTTACCACCCATAGATAAGCCTTGCTGACTCTGGGTACGT
GTGTAAAAACCATCTCTGTTTCAAACATTGGGATCACATTGCCGTTAAGGTTTTATAATCTGCT
TTCCTTTTTTTTTAAATTGTGAAGTGGAAATTTTATAGATGTGTAATTACTGACATGGCAAGAA
AAGTGTTAATGATGGCCAGGCTTGGTGGCTCACGCCTGTAATCCCAGCACTTTGGGAGGCCGAG
GCAGGTGGATCACGAGGTCAGGAGATCAAGACCATCCTGGCCAACATGGTGCAACCCCGTCTCT
ACTAAAAATACAAAAATTAGCTGGGCACGGTGGCATGTGCCTGTAGCCCCAGCTACTCGGGAGG
CTGAGGCAGCAGAATCGCTTGAACCCGGGAGGCGGAGGTTGCAGTGAGCCGAGATCACACCACT
GCACTTCAGCCTGGTAACAGGATGAGACTCCATCTCAAAAAAAAAAAAAAGCAAAAGGAAAAAG
AAAAGTGTTAATGAAACATTCAAGAAGAAGTCCCCAGAGTGGCCCACTGCTGCCTGAGCTTCTG
AGGTCAGCTGAGAAACGGGACTGGAGGGTGTCTGTCAAGGCCGGGGTAAAGTCTTAAAAAGTCC
TGGCTGTGGCCATTCCCCGAGGAGAGGGCTGCATGAGATAACCTCATGAAGGACCCTTCTGGTC
CTAAACCCTGCTTCAGCTGCAGTCCCGATGCAGGTACATGTGGCCGCTGCCTTTTTTGTGATTA
ATTATTGAACATGAGGAGCTGGTGCTCTTCTCTTCTGTTCTCCCGTACCCCGTGTTTTTGCTGA
CTCAGCTCTGGTCTGGAACTGGCCGAGGAATAAGCTCTTCTCGAACTCATTCACTCATAACACT
TTACCGACATCTGCCACCTACCTTCTCAAACCAGGGGTATTTGCTGGGATACACTTGCCCCCCA
AAAAGGTCAGGAACCCCTGTCCAGGAGGTGTAAGTGAGCCAGGGCAGTGCCACGCCCTTTGCAT
GTCTTCCTTCCATAGCCCCCACTTCATAGATAACGAGATGGCTCAGAGAAGGCAGGTGACAGTC
TCAAAACCACACACACAAGCAGGACTGGGATCCAAACTCAGGTCTCTCTGACCCCGAGCTGCTG
TCCTTAAGGTCACCACGAAACATGAATATAAATAAAGCCACATAGAAGGTGACTTGGGCCACAC
ATAGGGAGGCAAGCATCGGGAGTTGGCAGTTCTGAAGGGGGGATAGTGGGGTGCGGGAATCAGA
GGCTCCGTAGAGCTTTGTAGCATTTGTGTTCCTGTAGGCGTGGACGATGAGCAGAGTCTCGCAG
GCACAGACATGAGGTGTTCTGCGTAGCATGCACCGTGCCAGCAACGGTGCAGAGGTGGGGAGAC
TGGGGACATCTGGGAAGGCTGGCGGGTCAGTACACAGAGATGTATTTCCAGAGAAGCCTGTTCC
CTCCGGAGTCTCCTCCAGGGTGTGTGCATGTTCAGCACACCCCCATCCTAAAGAGGGGTGCTCC
TGGAGGCCACCTCATTCGCCTCTGCTGTGTCTGCAGCCTGTGACCTCTCACCTCGCTCTCCTTC
ACCCATCCACATACCGCAAGGCCACCAGTTTCTCTCCTCATGCCCTTGGTCCTCTTCCCATCCA
CTGGGAGGTTGGGAACCCTGGCTCTAATCTCAGCTCTGTCCTGGGCACACTGGGCGACAAAGGG
TGAGTCCTTCTTCCTCTTCGGGCCTGTTTCCTCGTGGTGCACTGGGGGATGAGGGAAGTATTGG
ATGTGCTAGGGTCTAAAGTTCCTTCCATTTCTATGTCTCTGGTTCTGGGCCACTCTGTAGTTTC
ATGCTGTCTGCAGGGAAGTTCCTGGCCTCGATGGCCCAGCTCCACACTGCCCAATTCCCCTCCC
TACATCCTCTCCCTGCTGCATCATTCCTTCTCTACCTGTCCTCCATGATCCTCTTTCCTTTTCT
AGCTGTCTCGTTACTTAATTCCACGAAGGCAGGGGCAGTTGTCCCAATTCTGCAGATGAGGCCA
GGCTCCTGCCACTTTGGAGTGCATAAGAAAGAAGGTCCCTCCTTCATCCGCTGACCTTCCCTGA
GCCCTGGGCTGACCTCTGGGGCACTTCTCCCAAGACATCTTAAAACCAAGCTGGGGCCAAGGCC
ACCACTTGTGGATGGCTAGACCTGGAGGAACCCTGAGTCAGTCTATTTCCACTGCCAGACCTGC
TACTCACAGATGAGTGACTACCTCTCTGAGCTGCAGCCTGCAGCAGGGGGCAATTGAGATAGTT
GTGAGGTCCAGTAGCTTGGGGCTTGAGGGCTGCTGCCTTTGGTGCCCAGCACAGAGCTGTAACT
CCAGGGAATTCCAATTCTGATTTCCACATAATTTTCTGAAAATAATGTTCTCCTCTCTTGGCTC
TGTAACCCCCTGCCAGGGGCACCTTGGCTGTCCTGTCCCTCCAACAATCTAACCCTCTCCCTCA
TGTTGTAATTGCAGATTTTTGCTGGTCTTCAGCTGCCTGGTGCTGTCTGTGCTGTCCACTATCC
AGGAGCACCAGGAACTTGCCAACGAGTGTCTCCTCATCTTGGTAAGTGCTGGGAGTCCGGGACT
GAGGGGGGCTGTGTGAGGTAGCACCTCTGGGCTGGGAGTCCGGGACTGAGGGGGGCTGTGTGAG
GTAGCACCTCTGGGCTGGGAGTCCGGGACTGAAGGGGGCTGTGTGAGGTAGCACCTCTGGGCTG
GGAGTCCGGGACTGAGGGGGGCCGTGTGAGGTGGCACCTCTGGGCTGAGGGCTGAAGGTGGAAA
GAGGCTTCTCATACCATGGCTCAGAGAGCAGCTTGCTGTGCTGTGTTCCCTCAGCTGTGGCTGC
CCCTCTCTGGGCATCATCTCCACTTTATAGCAAGTGTTGGGGGACCTCCTGCCTCTATGCAAGG
GCTTATGATGGGTCCAGAATAGAAGTGAGTAGGCTCCACCCCTTCTCAGGACAAAATCTGCAAA
CTCCACGTGTGGTGGATTTTAGGTCAGTTTTTGCCTAAACACAAAACACCAAATGGAAGCCCCT
CAGAGGGAGACAGCTGACAGCCAGCAACCCCTTTTGTCACCAGGTCAGAGTTAGGGAGTCTGAG
ACAGCTGGGACAGGGAGGGCCTGTTGAGGAGCAGAAAAATCCGATCAGTTCATGGGGACCGGAA
GGGGAGGACACACTAGGGCTTTTAGTCTTCTTGCAGGAGGCGGAGGGGGCCACCTGCCCTCCGG
AATCGTCAAGTCCAGGAAACTCCAGGAGAGGGGTCCGAGGAGGCCCTGGTCCCCCTAACCCAGG
GACTCTTGGCTGGGTCCGCGCTGTGACCTGGGCCCCAGTTCTGGAGACTGAGGACCAGAACTCA
GGCCCCTGGTCCCACAGGAATTCGTGATGATCGTGGTTTTCGGCTTGGAGTACATCGTCCGGGT
CTGGTCCGCCGGATGCTGCTGCCGCTACCGAGGATGGCAGGGTCGCTTCCGCTTTGCCAGAAAG
CCCTTCTGTGTCATCGGTAATGAGGCGCGCCCCGCCCGACCTGACCCCTGACCCCAGGAGCCAG
GGTGACGCCTTTACTCCCAATCCCGACTCTGACCCTGGAGACCCGCACAGATTCAGCGGACCCT
CCCCCTCCCTCCCCAGTCCCCTGCCACATCCCCAGAAGTCCCCGCCTCCGGGTCCGTGCGCGGG
GTAGGCTGGCTGTGATCTCGCCGCCCCCGCCCCTGCAGACTTCATCGTGTTCGTGGCCTCGGTG
GCCGTCATCGCCGCGGGTACCCAGGGCAACATCTTCGCCACGTCCGCGCTGCGCAGCATGCGCT
TCCTGCAGATCCTGCGCATGGTGCGCATGGACCGCCGCGGCGGCACCTGGAAGCTGCTGGGCTC
AGTGGTCTACGCGCATAGCAAGGTGAGGCCTGCAAGCCGCGCGCGGAGACCCGAGGGCGTGTCT
GGGGCACGACCAGAGCGGGCAGGGCGGAGAGGGCGAGGTCAGAGGGGCTGTCTCCGTGCTGGGA
AGGGGTGTGGCCTGCGGGGGTTGGAGCCCTAGCAGGAGGCGAGGTCTAAGCGGGTGGGGCGAAG
TGGATTCTGAATTAGGTAGGGGCGGGCCTAGGAGTCCGGACCGGATCAGGGGGCGGGGCCGGAG
AGGCGGGGCTTGAGGGTTTCCCCTGGATGCTTCTGGGTTTGAAGGGACCACTCGTACCACAAAG
TGGGCAGCTGAGGTGGGACTTGAGGGTGGGGCTGGAGCGGGGCTAGGGTGGGCCCCAGGTGGAA
GCCTGAAAGTGGGACTTGGGGGACGGGGCAAGGTAGGCCGGGTGCTGGAGTCCTGAGCCTGGAA
CCTGGAGACTCAAGGCAGGCGGGGTGAGGGTGGGGGTGGGAATGGGGGTCGGGGTAGGGGGAGT
GCTGGCGGTTTCGCGAAGGCCGGGGCAGGGTCGCCGTGATGGGAGGAGCTGAGAAAGAAAAGCG
AGCCTGGGACTCCGGGAGATGGGGGACCTTTATCCCTTTCCCGTGTGGAAGCCCCCCACATCTC
CCAGGCAGGCACAGCGCTCCTCACCGCGCCCCTCCGCCTGCCCCGCAGGAGCTGATCACCGCCT
GGTACATCGGGTTCCTGGTGCTCATCTTCGCCTCCTTCCTGGTCTACCTGGCTGAGAAGGACGC
CAACTCCGACTTCTCCTCCTACGCCGACTCGCTCTGGTGGGGGACGGTGCGTGAGGGTCTTTGT
AGGGCTGCCCTTCTCCCTGGGATCCTCCCTGGGAACTTCCCGAGGTCTGCCCATCGTGACTCCT
GACTCAGGGTTGAGCGGGCCTGCCCCTGCCCTCTCACTAGAGCTGGGACCCCCCTGAGACCAGC
CCCAATGCTAACCCCCCAACCTGCTCTGGTGGACCTGCCTCTGTCCCCAGCTAGCCCCGCACAT
CAAGACCTTGTGACTATACCCCTTTCCCCTGACCAGCCCAGGAGAGGGAGAATCCATCTATGAC
CCTAACCAGCCCCCGTGGGTGACCAGGGGCCCCTTCCCTCATGATCAGGCTCCTACCTGCCTGT
ACCCCCAACAAGCCGTAGGTGGCCCCCGTGACCAGTCCTGCCTGTAACCTGTTTGTGTCTCCAG
ATTACATTGACAACCATCGGCTATGGTGACAAGACACCGCACACATGGCTGGGCAGGGTCCTGG
CTGCTGGCTTCGCCTTACTGGGCATCTCTTTCTTTGCCCTGCCTGCCGTGAGTTGCCTCCTGCT
CAGTTGGTGGGGGAGGCTGAGGGTGGGACCTGCTCACCCCTGTCACACATTTGCCTGGGGAGCC
TGGGGTACCTCAGAGGGGCAAGGATGGGGACACCCTTGCAGCCTCTTACTGCCCCACCACTGCC
AGCACATTCCCCCAACCATGCCCTATCCCTCTAGGGCATCCTAGGCTCCGGCTTTGCCCTGAAG
GTCCAGGAGCAGCACCGGCAGAAGCACTTCGAGAAGCGGAGGATGCCGGCAGCCAACCTCATCC
AGGTACAAGATGCCCGGGAAGAAGCCCTAGGAGCAGGGCCGTGTGACTGCACTGGTGTGTCAAC
CCTGTGTGCTGACCCATGTCCCCAGCCCAACTGTGACACCACTTTGAAGCTCAAAAGGGCTATG
TGACTTTCCTGGAGCCACATGCCAAGTCACACACAGAGCCAGGATGCTCACTGACAGTGCCAGA
AACTTCCCCCTGCACCAAATGCCTGGTTTAGGGCTAGCCAGAACTGCCCTATTGCCCAACTCCA
GCCCAACTTCACAGGGCCTGGGGAGGGGCGGAGCCCAGACAGGAGCTGGGAGGCCTCTGGTGGA
GACCCACTGCTGCCCCCATCAGCTGTGCAGCAGTAAGCCTGCCCCACTTCCAGCACCTTCATTC
ATTCATTCATTCCACAAGCACTCACACAAATGAAGAGAGGATGGTGCAGACAGGGCTTTTAGGA
ATCTCAACATTTAGCAGGTGGGTGGGCCTGCAAAGTTGAGCTGGGCAAGGAGACAGAAGGAACA
GCCAGAGGGGTGGGTAGGAAGCCAGGAGTGTGTGGTCTCAGTTTCCCTCTGTGCCATGGCGTGT
TGTGACTGTGTGTGGGCTGAGGCCAGGGCTCTGATTTTCTGTGACCCTGGGACTAGGCCTTGGC
TTTTTCTAGTCAGGGGTGTGTGTAAGGGAACTCCTTGCAGGAAATGCTTCAGGGAATACTGGCC
CAGTCCACCTCTGCCTGCTCCCTAGCCTGTCACCCTCTGAGCCCCAAACCCAAGCCTCACTCAG
CCCTTCCTTATCTCTCCTCCCCAGGGTAGAACCCTCCTCCCTGTCGCTGTTATCTCCAGCCACC
AGCTCAGCCTTTTCTTCTTAGCGTCCCTTGGGGCACAATGGCCACTGTCCCCTGGGAGCTGGCC
TTCTGAGGGGCATTGTAGGGGCAGGCGGCTGGCACTGTCCATGCCAAGAGACAGCTAGTATTGT
GGTGCCCATAATTAATGAGACAGCTCTGGCAGCTGCTCCCCAGCCCATGCCAGGGGCCTAGGCA
AGCAGGAAGTAAAAATATTCCTGTCTTAGGAGGGTGCCTGGCTGGTGAGGTCAGCAGTGGCAGC
CCCTTAAGGACAAGAGGCATCCAAAGAAGGGAGGCGTCCAGGGCCCAGCTCTGCCTTGTCCTGC
CTAGCAGCCTCCATGCCTCCCTGCTCTCACTGATGGCCACACTCACAGTCCCTCCCTGGCTCTT
CCTACGTGGAGGGAGAGGGACAGTCTCTCCTCCTGTCTGACTTTCATCCCTCCTGCTGCAGAGG
AAGCTCGGCAAGCCCATGGATGCTGAGGGGTTGGTAGGTAATGCTTTTCCTCCCCTCTCAGTCC
TTAGTATTCCCATGGGCAGTGACAGGCAGCTGGGAAAGATGGAGTGGCATTGCTAGTAATAATA
ATGACATTCTGCAAACATTTGCAAAGCACCCACATGTGCCAGACACTATATTTGCACTGAGAAT
GCAGCGGTAACAAAGACACAGCTTGCAGTCTAGGGGGAGAGAAAGTTATCAGTCAAATACACAA
TGAATAGGTATTCATCAAATGTGATAAGGGGAATAACAGGAGTGTTTAACAGAGGAACCTGGCA
TGAAGTGCCTACTATATACCAGGCACTGAGCTTGGCATTTAATATACAACTGTTCATTTAATCC
TCACAACACCCTGGTAGGCAAGTAGTGTTACATGCGTTTTACAGGTGAAGAAACTGAGGTCCTG
AAGCTTTACTTAATTTGTCCTCACTAATAAGGGGCAGAGCTGGGATTGGAAACCCATGTCTGCC
TGACAACAAAACTCCAGCTCTTAACCTCTATGCTCTATGGCCCCTGGCTCTGACATTGATCTGC
TTTGTCCCCTCGGGGAAGTCGTTTCTCCCTAGGCCTTACTTTCTTGGCTGCCCCTGTCAGTGGC
TGTGGAATTGGAACTGGCCTCTGGCTCTGGGTAACCCACAACTGGACCAAGGACTGGGTTCTTT
CAGGGGAGAGGGCTGGTGGGGACTGAGAGGCCTCACTGATGCCCCATCCCCCACGTCCCCCATA
CCACCAGGCTGCCTGGCGCCTGTACTCCACCGATATGAGCCGGGCCTACCTGACAGCCACCTGG
TACTACTATGACAGTATCCTCCCATCCTTCAGGTAGGTCCTGCTGGGGGTGGGGGTGGGTGGGG
GGCTGGCAGCAATGCCCTTTGAGGACAAGTGGCTGAGACTCAACCCTGGAGGGTGGAAAGGGGG
TGATGGCTCCCAGGGGAGCACCCTGGGCTGGCTCTGCAGATCCTATGTAATTCAGAGCCTGGAG
TGTCCTTTATTCCACTCTGCTATGCCCAGGGAAGAGGTGGATACTGGACATAGGGCATTGGTGA
AGCCCTGCCCCATGGCTGAACCCCGGCCCTGGAGTGCTGGCAGTGTGCATGCTCACCCATAGGT
GATGCCATCTAGGGCAGTGATACAGCCAGCTCGTCTCCCCTCAGTCCTGAATGGGGGACAGAGT
TAGTGGATATTGCAGCTGGTTGGAGAAAGTGTGGGATGGGCAGAAACATGTGTTCCAGACTTAG
GTGCATGCTCCTACCCTGAACCCCCATGTAGGAATATGTGCCCACTTTTACTGGGCCAGTCAGC
AGCCTCAGGGCCCAGAAGTGGGTCTGCCCCACTGGCCCGGGCCAGGCTAAGACTGCATGGGGGT
GGCACCAGGAGAGGGATTATTAATAGCATCACAAAGGTGCGTGTGGCCAGGTGCCTGGCTAGGC
CCTCAGGCAGGAATGAAAACCATGGAGCCCAGCTCGGTCCCACGGGCAGGCGGGCATCAAGCTT
GTGGCTGGGGCAGGATGCTGTGCTCAGCGCTTCTGCGGGTGCCTTTTTTGCCTCATTAGTTCTC
CAGGAGAAGCTGTTGCGCGATTCCACTCGCCTCTGCACCTGGCTTCCCCATCCCTGCGCCCTCC
CAGCCCTAGGGGCTTCCCAGGGGAGAAGCAGGAGAGAAGGGGCCGGGAAGAGGGGCTCCCAGCA
TCACACTGGTGCCCCCACATCTCTCCACCCGGCAGAGGCAAGCTCCTACCTCAGAGTGGGAAGG
TGACTAGATTAGAAGAGAGGCCTTTTGTTCAAGGCTGGGCATTCGAGAGTGGGGCAGGGCTGAT
TTGTAAGAAATACAATGTGTATGAGGGAAGATCTGGGGGTGGGGGTGGTCAGATGGTCTAGGAC
CTCTGCCCAGAGGAACAGAGCCTAGTCTGGAGATTCTGGATCCACTGGGCATCTGCTCCCTGGA
CCTTAGTTTGGTCATCCATGCAATGGGAAGGCAGGCAGGAGAGAGGGAAGATACCCTCCTTGGC
TCATGGCAGCAGAAAATGGCCTGGAGAGTTAGGAAGAAGCCACGGTCCCGAATCTAGTCTTCAA
AAACCCAGTGGCAAGAGTGAGTGCTGGAGGGGAAGGAAGCTGGGCTAGCCACCCTGTCACACCG
CCCTCCTCACCTCCATCTCCCCTTAAAATCCAGAGTCAGATCTGGAGGGAAAGGATGTCAGGGC
CACTGCTGGCCTCTCTGAGGAGGCACGGCACGTTCAGGCAGTCAGCTTGATGGGCTGAGAGTAA
GCTCCTTGCACGGCTGCCCTTGAGCTGTGCCAGCCTTCACATCCATGCTTGGCATCCCTGGGAA
CTGGGGGTAGAAAGGGAGTGGGGAAGGCCAGTCTCCCACTGTCCACCCTGTCCTATTCTGGCCG
GGCTGTCAGTGAACACCTCTAGAGCAGCAGGACCTGGCAAGATCTGAGCTCAGGAGCTCTGTGC
CCACTGGGTGAGGGGGGTGGTGCCATGGCCCTGCCTGCCACTGATGGTGCCCTCTCCTGCAGAG
AGCTGGCCCTCTTGTTTGAGCACGTGCAACGGGCCCGCAATGGGGGCCTACGGCCCCTGGAGGT
GCGGCGGGCGCCGGTACCCGACGGAGCACCCTCCCGTTACCCGCCCGTTGCCACCTGCCACCGG
CCGGGCAGCACCTCCTTCTGCCCTGGGGAAAGGTAGGGGCCCCGTGGGGCTGCCACCTCCTCTT
GCTTCTCCTCCTCTTCTTCCATTCTCTGTCTTCATCCTCTCTCAGACCTGCCTTCAGCCACTTC
GTGGGTGTCTGGGCCTGTTTGGGGGACTCCTAGGCCGTCAGAGGGCCAGACAGGTACAGACTGA
GGGCCTCTCTGGAGGGGTCAGGCTGGACTCACCTTTTTGTCCTGTGGGGCTCTGAGGGTCTGAG
TGGGAGAGATGTCCATGCCATCCTTTCCCATCATCTCCTCCGTTCATGGCATTGTCCTCTTTCT
TTCTCTGTTCCCACGTCCCCCTTACTCCTCCATCCCTGCACCCCCATCCCTCCCGGGAAGCTGG
ACAGAGGAGGAGGCCACTGGCCACAGGTGCTTACGGCTCAGGTAATCGTGGGCACCATCCTGGG
GTGTGAGGGCAGGGAACCCCCTCCCCCGGCATGTTGCTCTAGGAGGGACTTAGTACTGAACTCG
CCTCTTGGGAACGAGATGCCAGCTGGAAAGAGAGCTCTGTGATTAAGACCTCTGTAGGACCTGC
GTAAACTCAGCCAGTGACTAATGTTCCTTTCTTGTGCAGCCCTTGTCTGCAACTTTGCTAATCC
CAGAGGGTCCTCTTGGGGTTCTGTTTCCTTCCTTACTGAGGTACACTTTGGCGCTCCCAGCCAT
CTCTTTCCCCTTGAACTGTCTCTCCTGAAGCTTTTTACAAAATCTTGAAAGAAGAACAAAGAAC
AAACAATGCTTACCCCCACATAAACGTTCCTAAAGAGAAGAATTTCAGGCATGTTTGGATAAGG
GAAGCCCGTCCACTCACAGCATGGGAAAGTGGCTGCTCTTGTAGAGGTTTAGCTTTGAGGTCAG
GGGTTAAATCCCCCTCATTCTTTTTCCCTCGTCCTTTACCCATCTCTTTGTTTTGTCTCATCTT
CACACATCACCCCTGAACCAGCCAAATGGACATCTGGCCTTTGAGCTTCAATGTCATTCTGAGC
CCCAGGCCCAGAACAAAGAATAGGAGAAGAGGCGAGCCGCCCAGTGATCAGCAGGGGAGGCGTG
GTGGAAGCTCGCCTCTGCCACCCGATGCTGTGTGTCCTGGAGGAAGCCTTCAGTCATTCTGAAC
CTGTGTGTCCTGGCGGAAAATCGGCAGTGTTTAGGCTGATTGGGGCTCTGGGTACTCTAGAGTT
TCTGGGCTGAAAAGGCCTAGGGAGGAGTTTTGGTGCAGAGGATGCAGGGAGCAGCCTCCCTTCC
TTGTTCTCAGTGAGGGCACTTCTGGGCCAGGGGCTGAACAGGAAGTGGGTGGAGAGGGAGAGTC
CCTCCAGGTCTGGGGCTGGAGGGAGGGGAAGCGTGACTGCCAGGCCAGGCTGAGAGCTCCCTGG
GAGAGTAGGGCCCCTCTCAGATTCTCTGCCCGAAGGTCCCTCATTGTTACCTTCATCCCTACCA
AACATAGTTTCCAGGCGGAAACTCAAGAGTTTTTGTATCCCAGCAATCCTGTCCAGGACCTGAG
CCAGGGCTCTCTGTGCTTCCAGTTCACTCTGGTCTCATTTTGACTGAATAGGAAGGCAAGGGGA
ATGGACATTAGCCTGGGGCCTAGTACCTGTACACTCCCCACGGCTCCTTTGGTCCCTGACACCC
CCAGGGCCCAGGAACAGATTACTACTAAGGGCTTGGCTGTCACTGACTCCCAGCCTCGTATCTA
TCTGCCTGGGAGGGGACTTGGCGAGTGTCTGGGACACAGGGTGATGGTAGTAAAGTGGCCCTTT
CTCCCAGGGACCCCAGGGGGCTGAGCCATGGTTTGTAGATCAGTCACCAGGCTCAGGCCCAATG
GCCGTATCGTTAATCGTGGCTGTCTAGACCGCCAGCCAGGACACCCTTCCTCCACCAAAAACAC
ACACACATATACACACTCGGTTGGCCACACCTCTGGTGGTGCTTGGGGATGGACCTGGGCCAAG
TGTGCCCACAGGAAGTGGTGCTAAAGGAGCAGGATTTCCTGGGGGATGGCATTGCCAGGGCCAG
CACCTCTCCTCTTCAGGGTTTTGCAATGAGTTTATCAAACCATGGTCTCCAGACCTCCTGCATC
AGCATCCCATGGAGTGTTTGTTCAAAATGCAGATACCTGGACCTGTCTCCAAGCCCACAGGATC
AGAATCTCTGGAGAAGAGACACAGCCTTCTGCATATGTAACATGGTCCCCAGGGGATCCCTATG
CAAAGTGTGAGAACATCTACGTTCTGGTGATGGGGCTGGAGGATGATTTAGGTGGGGGTCCTTC
TTTCCCACCAGCTACCGGAGGCCGGCCCCATCCCAGCAGCTCCCCACACTCTGCCCACAGCCCC
TTTCCCGCTAACCTCTGTTCGTGTCTTATTCTCAAACTTCCAGCCAGATGTTTAATAATAAACG
GAGTTTCTTTCGGATCCACGCCAGCTGGAGACCGAGGTACCCCCTCGCCTGCTCCTCCTGTCCC
CACTCCTCCTTGCCCCACCCAATTTGGGGGCTGGAGAGGGGACAGGATGGGCCAAGGACAAGGT
GCATGTGCCTGCCGCCTGCCGTCTGCCTTGGGTGCCCAGTGAACCCCTCGCCTTTCTGGGATGC
CTCTGCTAGGTCTGGGGCATGGGCCCAGGGTGCCAGGAGGGGCACGTGCAGGAGCCTTAAGGAT
GTGTGCTGGCTCTGCTGCTGATGCCCTCTGTGATCTTGGCCAAATTGCTTCCCTTCTTGGACCT
CAGTTTTCCGTCTGTGGAATGGGCAGATTGAACTAGAGGACCTCTGAGGGTCCTTCTCACTCTG
ACTTTTGCCAGGCCTTGGGCTTAGCTTTCTGTCTCCCTGCTACCCACCTGGGGACCTAGCAGAT
GCCTGAAGGAGCTGGGTTTGGCACCTTTGCCAGCTCCAGGACCCCAGCTCTTTTAGCGGCATCT
CCATGGCATTCCTTGGTACCTGCCCTGTGCCAGGACTTGCTCTGTGCACTAGGGACACGGTGAT
GAATAAAACATCGTCCTCGGAGAGTTGCAAAGAGTAATTGCAGCTCAGTGTGATGAGTGCAACA
AAGGGAGGAAGCACAGGGGCTGTGGAGCCCGGGTCAGGCACACAACCCAGAGGAAGCCCTAAAA
GCAGTGGGTTTCAGGGAGGGCATTCCAGGCAGTGAAGCAGCACGGACCCAAGCAAGGAGGCAAG
AGGGAGCACAGTGTGGGGAAAAAAGCTGGCAGCCCAGTTTGGCCCCCCTGAGACTGGACATCAG
AGCGAAGGTTGGGGGCAGAGCTGGGTCATGCAGAACCTAAAAGCCCAGTGTGAGCTTCACCCTG
TTGGCATGCTTGGCAGCCTGAGCTCATGGAGTCCTGGGTTTCCAAAGGTGCCTCTGGGGCCCTG
TGGGCTGGGGTCCCGGAGCTAGGAGATGAGTGGCAGGGCTCCTGGCTGCCCATGTGTGCTTCTG
CTGAGAGGTGTTTTTTCCTAGAAACGTGGGTTCTGGACCACAATCTAGCTACTACCCACTATTC
GTGTGTCCTTGGGCAAATCACCTGACCCCTTTGCACCTCAGTTTCCTCAGATGTAAAATGCAGA
TGTAAATAGGGTCTGCTTCCACTAAAACTGGACCTGGCTCCAATAAATATTGGCCTTATTTGAT
TTGGTATGTTCAGCAGTTAAGATCTTATTTACCTTAAAAGAAAATAGCTTAGAAACCATGGCTG
TGGGCAATGGTTTGAGCTGAAGCGTTGAGCTAAGGAGTCTCTGGGTCAGGCCCGCCATTTTGCA
AGCCTCCTTTGGCTGTGGAGGGTGTGGACAGGAAGGACACAGCCATGGCAGAGGCCAGTGGCGA
GGCTGTTTCCATAGTCCCTGAAGAGGGGCTGTATGTGGCTTCAGAAGTCGTAGGCTGCCTCTGT
TCCCCCAGTGAGAGTGGCCCTGGGAGGGCAGATCATGAGGCCCTAAAGAAAGTCCTTGTGGAAG
TGAGTTCAAGGGGTTGGGACCAGCAGGGCAGCCTGGGCAGAGCTCGGCCTCCCCAGCAGGGCAG
CCACAGTCCAGCCCACCCCATCTTTCTCCCAGGTACCAACAGATCCTTAGCCAGAGTTTCTTGA
CCTTGGCATCATTGACATTAGATAATTCTTTGTGGATTGCGACTATCACATGCATGGTAGGATG
TGGAACAGCACCCTTGGCCTCTACCTACTAGATGTCTACCTACTAGACATTGCCACATGTCCCC
TGAGTGGGGGAACTTGCTCCAGTTGAGAACCACTGCTCTACACCCTATCCTGATTGCTTGACCC
AGAAAAAGAACATAGACTCTGAAGTCAGAGAAGGCTGGGTTCCAGTTCTTGCTCCATCTCATAG
GAGCTCTGTGACCTTGGCCAAATCATCTCACCTCTTTCCGTGTATATAAAATAGGGATGGTAAA
GACCGCCCACCACACACAGTGGCTGAGAGAACTGAAAGAACTAAGGCAGCCTGATGGGACCCTG
CACGTTCTGGGAGCCTGGGAGGGGAAAGAGCTTTTTGGTGCCCACTGTGTGCCAGGTTTTCTTC
CACCTTCTTTTAGCTTTCAGACTTAGAGGAGCTGATATGAGCCATTTTCTGGGCCCTGCCCAAG
GAACTGGAATCCAGACCCACTCCTGGGAAAACAGTGCCTTCTTGCATTAAAAAGGAGCTCAGGG
CCTCTGGCTGGCTGGAAACTTACAGAACCCCACAAACCAGACTGGAAGCTTCCTCAACCATCAC
AGAATCAGAGCTGGAAAGGGACCTTTCAAGGTCTCTAGTGCAAGCCCTCGAACTCCTTCCTCCA
TAAGTCCTGCTGAGTGCAAGCTCAGCCTTGCTTGCATTACTTCTTTTGACAGGGAGGTTGCCCT
CTTCTCCAGAACGCCATTGGAGCCTTATGTGGTGGGCGCAGTGATGTGGAGTTCCAGGCCCTTG
GCCAAAGTGTCAGGGCCTTCTCCACTCTCCTCTCTTCCTCTCCCTCTTGGAGGAGTGGAGGACA
GGAGAAGGGGTTGCACGGACCGGGCAGGGTGGAGGGTGCTTGCCAGCATGAGGGAGCCTGCAGG
AATGGCTCTGCAGAGGAAAGTTTGGGAGAGCCAACCTCAAACTTTGATTGGAATCTTTGGGATG
TGTCGATGGAGTCCTGGGCCAGTGGAGAGCATGCTGGATAGTGGGAACTGGGAACTGTCCCTGT
CCTTTTGATACCCTCAGGGCCCCCATCCTTGACCTATTAACCTCTCCCCTCTGGGCAGAGGCCG
CCACCCCTAAGGATGGCCCTACATCCTGGCCACCTTCCTGAAGGTGCCCCTGGTTTCGAGGTCT
CCCTCACTTCAGCACCTTGGCTCCCTCCCCTCCACCCCATGCCCTGGGCATGGGAGACCCCAGT
TCCCACCCAATACCGAAACCAGAATCTCTTCTCTGCTCAACCCTTGATCTGAAAGCCTCTGAGA
GTAGGTGACACGGTGTCCTCCCCCAACTCCTGCCCCACTTCAGGTCTCCTCTAAGGCTGGCTGG
TACTCTCTTGATCTGGGGCCCCAGACATTTGGGGTGGGTCCCCCTGAACCCGAACCTGAACCTG
TCGGAATCTCTAGTGGCAAACCACAGCAGGGGAGGCAGCGATGACGTCACAGGGCATGGGATGG
AGGACATTTGCATAGGTCCTACCCCAACAGCCATAACATTGTCCTTGAACCTCTTGGACACAGA
GTTACTCTACCAGATCATGGTTAACCAGGGCTTGTCCTGGGGAATGAGGCCTCTGCTAACTTGT
TTTCCTCCAACGTTTGGGGAACGTGGTGGGGAGTTGGATGCGGGAAGGGAAGTCTGAGTGCATG
TGTAGACGTGCACGTACACGTTCACATGCACACAGACTGTGTAAATGCTGTTGAACCGGGAGCT
CAGTAGGCAGTATCGGGGGGTAGATCTTTAGCGGGGATCCAAGACCACACAGGCAGGATGTCAA
TCAAGGTGGGCTGAACTTAGGTAGGAGAGACCACAGAAGAACATGTTATCAAATAGAGACCCTC
ACTGAGAGGGCAGGCACCAGGCATGGCCTGGGCATACATGTGGGCCCAGCAGCTAGAACCATGG
GGCCGAGGCCCTCAGTAGGCCATCACGCTGCACACCTCCAGGGCACCACTGCATGGAAGTCTGT
GTGATGGAGTCCTTATTTTGCAGTGCACTGCCTGCACAGCTGTACGAGGCCCTAAAACCCTGAC
CAGTGTGGGATCAGATAGCCGCAGCAGTGGGGAGTGGAGGAAAATATGAAATGACACATGTAAA
CACACGCCAACATATGTAGACACACCAGTGCCTGTACACCCACACTCGCACATGTGTGTGCACA
AGGTGTGTGTGTGCATGCGCGCACACACACACACCCTCGACTCCACACAGCCTGCCCCTGTGTA
CAGTGAGGACTGGAGGCCTACCTCCGTGTGCATGGCCAGGTGAGCTTCCGACCCTCAGCAGCCT
GTCTGTGCCCAAAGGGGTCGCCACCCCCACCCTCTGCCCACTCACCTGCGCCAGGCCCAGCTCC
CACATCCTCCTGTCTGTGTCTCTGACTTTGGATTTCTCCCACTCCTTCCACTCTGACATCTGTC
TCCTGTGCACCCCTTATCTGTCCGGGTGATGAGGGGTGGGATGTGGGTGGTGGGGAGAGGATCT
GCTTCGACTGACCCCGAATCAGCCTCTTGTAGGAGTGAGGGCCTCCCTTACCACATCCTTGTTC
CATCCCAAGAAGTCTCCGCTTGGCGGGGAATCCAGACCTAATAGCCACCCCCAAGTCCTAAGTC
AGCTTTGTCCCCACTCACCCCCACCCCCAGCTCTGGCTAACTTGGCTCTCTCCCAACCTGCCTG
CCCTGCCAGCAGCCGGATGGGCATCAAAGACCGCATCCGCATGGGCAGCTCCCAGCGGCGGACG
GGTCCTTCCAAGCAGCATCTGGCACCTCCAACAATGCCCACCTCCCCAAGCAGCGAGCAGGTGG
GTGAGGCCACCAGCCCCACCAAGGTGCAAAAGAGCTGGAGCTTCAATGACCGCACCCGCTTCCG
GGCATCTCTGAGACTCAAACCCCGCACCTCTGCTGAGGGTAAGCCCCCGGGGGGCTGAGTCCGA
TCGAGGGCCGGCTGAGGGTGGCAGGGCGGGGACAGTCTGGGCTGGGAGCAGAAAGATCTGGCTC
GCGTCTCAGCTCTGGAACTGATGGACCGTCTTTGGGCTCTGGTCTTCTCATCTGTAAAATGGGC
ATTATAATATTTGCTCTGCTATACAATGGACATCAGACTGTTTGGGAATCACGTGGAGGGTGGC
ATTTCATAGGGGTTAGCAGCACAGGCTTTGGAGCGAGACTGCCTGGATTTGCATCCTGGCTTTG
TCACTTATCTTAGGCGAGTGACCTAATTTCTCTGGGCCTCATTCTCCTCATTCATAAAATGGGA
ACAATAATAGCATCCACTTCCTAGGATTATTGTGAGGATTAAATGAGATAATCCATGGAAGGTG
AACAGAAGACTTTTGGGAATATAGGAGGTGCTCAACAAATAGCTAAACACAAATGTACTTTGGA
AGCGGCAGGAATGCATCCTTGATGAGCCCTGACTATGCACTGCCCAGCACTGGCTTATCTCATT
TACTTCTCCCAGTGACCCTGGAAAGTAGGTTCTGTTTTTGTCCCCACTTTACAGACGTGGGCAC
TGAGATCTCTCAGCTTGTGAGTGGCAGAGGTGCTCTCCTCAAGCAGGTCTATTCAGCTCCAAAG
CCCAGGCCTTCTTCCTACCCCTCTTCACCCAGCCCAGGCTGCAAGTATGAGACTGTGGACCATG
CTGATGTCACTTTTCTGAGTTTTGGCTCTGCTGGAGACTTCCACTGTGATTTAGGCAGGAGACT
GCCCCTTTCCATGCCTCAGTGTCCTCTTCAGGAAAATGAGAGGGTTGGACCAAGCCCCCTGGAA
GACTTCTCCCAGCTTTGACATACTTTAGGCCCCTGGGTGGGGAGAGGTGGGGTGAGTGCACAAG
GATGGGGGATGGGGACAGCTCCCCCTTTGGCCTTGGAGGGAGGGGACCCAGCCATGCTGTTTCT
GCCTGTGCTGTGTCAGCCCTCAAGATGCTGCTGGCTGACACCTCAGAGTTTACAGAACCCCATA
GACCAGTCTTTGAGAGGTGCTGCCCATAGAAGCCTGGGCACAGCTGGTGCCCAGGACCTCCCTT
CCCTGTCCTGGAAGCTGTCCGGGCTCTTGCCACTGCTCCTGTGAGGCAAGGACAGCATCACCTC
TCTGCGCAACACAGGGCACTAGCCTCAGAGAAGCTTCTCTCATTCAGGGAAGAATGGTTTGTTT
TAAGGGCCTTCCCTAGTAGCAGAGCTGGGCCTGGGAGCCAGCCACTTGGGTGTCCTTCCATCTT
AGCTGAAGGAGAAGACTGTGTGCATGATTACATGCAGTGCCATCAAACCCCTTATCTCTGGGGC
TCACTGTTCTGCAAGGTGGAACCAGTGGGGCTTCCTCCAGGGCTTTGTGCAACAAACTTGCCCT
GGACTAGGCCAGCTGTGCCCTAAAGCAGCTCCCACCTACCCACCAGGCAGATGTTTACCCTGAC
TGGCCACCGGGGCAGATGGGCATGCAACACACTGGGGCTTTCCACCCTGGGGAGGGCAGTGAGA
CACAGGAGCCCCAAGAAGGTTCTGAGCCCTTTCTGGGCCTCTGTCTTCCTATTGGACACTCTAC
TGGTGGTTTGGCATACAAGGGTCGGATGGGAGGTTGGGAGTGGCCCCTTTGGTGGGCCACTTGC
CCCATACCTGCCTTTTCAGATGCCCCCTCAGAGGAAGTAGCAGAGGAGAAGAGCTACCAGTGTG
AGCTCACGGTGGACGACATCATGCCTGCTGTGAAGACAGTCATCCGCTCCATCAGGTAAGACTG
AGGCCTGAGGCGAGCACCCCCCTCCGTGTGCCACCCACTGCTGCTCCCCATCTGGGCGGGTGGA
TCACTTGAGGTCAGGAGTTTGAGACCAGCCTGGCCAACATGGTGAAACCCCGTCTCTACTAAAA
ATACAAAAAATTAGCCAGACGTGGTGGTGGATGCCTGTAATCCCAGCTACTTGGGAGGCTGAGG
CAGGAGAATCACTTGAACCTGGGAGGCAGAGGTTGCATTAAGCCAAGATAGTGCCATTGCACTC
CAGCCTGAGCAACAAGAGTGAAACTGTATAAAAAAAAAAAATGTATTTTTTATGGTGGGTCTTG
GTCAAAAAAGTTTGAAAGCCCCTGCTCTACTGGCTGTCTCCATGCCTCAAAAATTAAGCAGGGA
CCAGGGTCTCCTAGGCCACGGCCTAGGCATGGATCTGGCCTCCAAGCTCCTTGGTGTGCCGTCC
TGGCCTAGTCTCCATCTCCAGCCTGCAGCTCTAGCTCCAGAAACCCCCTCAACCTCCAAGTTTT
CTGGGCTCCCCACTTTCTTCCCTGGCTGATACACCTGCCCACAAGCCTCTTTTCTTGTATTCCT
TTTAAAATTAGAGTCAGGCTGGGCGTGGTGGCTCATGCCTGTAATCCCACCACTTTGGGAGGCT
GAGGCAAGAGAATCACTTGAGGTCAGAAGTTCGAGACCAGCCTGGGCAGCATAGTGAAATCTTG
TCTTTGCAAAAAAAAAAAAAAAAAATTAAAAAATTAGCCAGGCATGTTGGTGTGCCCCTGTAGT
TCCAGCTACTTGGGAGGCCAAGGTGGAAGGATGGCTTGAGTGCAGGAGTTTGAGGCTGTAGTGA
GCCGTGATTGAGCTACTGCACTCCAGCCTGGGTGACAGAGTGACACCTTGTCTCTAAATAGATA
AATAGATAAAATCAGAGTCAGCTGGACCTGTCCCCACTACCCCCCACAGTCTGAAGCCTCTGCT
TACCCCCTTTTCACCCATCCATTCTCTCCCCTCCATGTGCCCAGTGTCAAGGACATAGTACCTG
ACCTGCCACCTGACCCAAGCCAGCTCTCCTGGGCCACCCCACCGACCTCTCAGCCAGCATGCCC
CAAACCTGCTCCTCTTCCTGGGCTGGTTCCCATTTCAGGCAGTGGCACCACCATCCACTTGGTC
ACCCAAGCCATGGGAGTCATCCTGGACTCAGACCAGGGAGACTTTCAGCCCCACCTCCTGAACT
GCTCCAAGCTCTTCCATATCTCCTCCCCCATCCCCTAAAGCTAGTTTCCCTGCCCACGCCTCTG
CCCCTCCAGGGTATTCTCCACACAGGCTGGCAGAGCTGGCATGCTAAAGCAGAGTAACTGAGCC
GGGAACAGTGGGTCACACCTGTAGTCCCAGCACTTTGGGAGGCTGAGACGGGCAGATCGCTTGA
GTCCAGGAGTTCGAGACCAGCCTGGGCAGCATAGTGGGACCCCCATCTCTTTAAAAAATAAAAA
TTAAAAAAAAAAAAAACAGAGTTATTGATGTGCCTGCCCCACAATGTCCCATTGCCCAGTCTCT
GCCAGAGATGCAGGGCTCTTCAAAGCACACCCCAGCCTCCTTCTCGAGGCTGATCTCCTGTCTT
CTCATACCATGGCACCCTGAACCCCATCCTCCACCCCGGCTGGTTGATTAACCCCTTTCCATCT
CATCCCTGTTTCTGCTACTTGGAGGTAGGGGAGGCTGGGAGACGCAGCAGAGGCTGTTCATGGT
GGCCAAGCAGGAGGTGCCCTGGTGCTGGACAAGGGGATAGCAAAGAGATGGAGAGGGTGCTGGG
AAAGAATCCCTGCTCTAACAGGACACTCCCTCTGAGCCCCCTCCCCCAACAGGATTCTCAAGTT
CCTGGTGGCCAAAAGGAAATTCAAGGAGACACTGCGACCGTACGACGTGAAGGACGTCATTGAG
CAGTACTCAGCAGGCCACCTGGACATGCTGGGCCGGATCAAGAGCCTGCAAACTCGGTGGGTGC
ACCGGGCCTGTTGGGAGGCAGGGGCAGGGAGGCAGCGACCCCAGCCCTGAATGAAGTCTGAGGC
CAACCCCCGAGCACCCCCAAGGGCTCACTGCTGCAGCTGAGTTTCTAGACTGAGGAGGTCCCTG
GCTTGCAGTGCCAGCCTGAGGCCAGACCCAGCACCCGTCCCAAGGCTGAGAAACAACCCAACCA
TAGTTTCTCTGTGAGGTGGGTCCTCTGTGCAAGCCCTATTGACTCATATGCCTTGGGGGCTTTG
TTTAGAATGACTGTTTCCTGGTCCTAAAATAATCAGCCTAAAATAATCACTGACCTCCCATCTC
CCAAGAGAATAGGCAAATTGTCCTCACTGCCCACCTCTTGCCTCTGGAATCCTCCCACATCTCT
CTGGTAGACCCAGCATTAGGAAGAATCCTCACCCCAAGACCCACATCACCTGCACCTTGCCCTT
CTCCTCTTCTGGCCTGCATTTTCACTGTCCACTCATTCATTTAATCACTCGAGAAATAGTCAGT
GGGCATTTACTACTTGCCAGCCTGTGGGGATATGGCAGAAAGCGCAGCAGAGTTCCCACACTTA
TGGAGCTTTCATTCTAGTGGAAGGAGAATAAGTGATAAATAAGTAAAACTGGAATATGTCAGAC
AACGATAAATACTAAGGAGGAAAATAAGGGTCAGGCTGTTAGGGTTTGCAATTTTAAATAGGTG
AGAAGGTTCTAGAGGGAACAGCAAGTGCCAAGGACTTGAGAGGGGCAAGTGGCTGGAGTGTTGG
CTTCAGCACAGCAGGGAGCCTGGTGTGGCTGCACTGGAGTGAGAGGTAGGAGGTGAGGTCAGAG
GGCTAACGGCACTCAGAGAGTGTAAAGTCCTGTAGGCCCCTGCAAAGACGTTGGTGTTCATCCA
GGATGAGCTGCAAGCATTGGAGGGTTTTGTGCAAACGACTGACAAGATCTGAATTGTCTTTTAA
AAGGATCACCCTGGGTGCTGTGTTGAGGATGGACTTAGCGGAGTGAGGGTGGACACAGGTAGAC
CAATGAGAACCTGCTTCAGACTTCCACGCATGAGACCGTGGGGACTTGGAACAGAGTGGCAGCT
GCAGAGGTGGGACAAGTGGTCAGATTCTAGATACATTTTGTAGGCAAAGTTGACAGGGTTTTCT
GATGGGGTGTTAAGAGAAAGAAGAGAGTCAAGGATGAAGCTAAGGTTTTTGGCTTCAGCAAGAG
GAAAAATCGAGTTGCCATTTGTTGACATGGAGAAGGCAATGAATGGAGCAAGTTTCGGTCAGGA
GATTTGGGAGGTGCCGGGTTTGTGATGCCTATCTGACATTCAAGTGGAGTGTTGATCTGGCAGT
TGAATAGAGAAGTGTGGAGTGCAGAGCAGAAGTACAGGATGGAGATGAAGATTTGGTGTCGAAA
GTGTAGAGGAATTGAAAATTATGGATCTGAAGACATCAACTAGTGAGTGGAGTAAATAGAGAAT
AGAGGTCCCAAGAGTGAGCCTTGGATCCTGCAGTGTTTCCAGGTTGCAGAGATAGAGGAGGAAC
TAACAAAGGAGACTGTAAAGGAGAGGTCAGGGAAGTAGGAAAAGAACTGGGAGAGGGTGGTGTT
TCAAATGAAGAAAGGGTTTGCTGGAAGAAGGGGTGATCAGATGTGTTGAGTGCTGCTAGTAAGT
CAAGTAAAATGAGGACAGGAGTTGATCAATGGATTTAGCAACATGGGGTTATTTGGGAGCTTGA
CAACAGTAGTTTTGGTGAAATGGCAGGGGTGAAAGCCTGACTGGAGTAGGTTTAAGAGAGAAGG
GGAGGAAAGGAATTGGAGGTAGAGGATAGAGATAACACTTTCAAGAATTTTGCTGCAAAGGAGA
GCAGAAAAATAAGGTGAGGTCAGTTCTAGCCTTGTCCACCCACCTTAAAAGTCACATTCCCACG
TGTCTCCACTCCTCCCATCCTCTTTCCCCTTTTCCCCAATCCATCTTTTCTTTTCTTTTCTTTT
CTTTTTTTTTTTTTTGAGACAGTATCTTGCTCTGTCGCCCAGGCTGGAGTGCAGTGGTGCAATC
ACAGCGCACTGCAGCCTCGACCTCTCCGGCTCAAGTGATCTTCCTGCCTCAGCCTCCTAAGTAG
CTGGGACCACAGGCATGAGCTACCATGTCCAGCTAATTTTTAAAAAATTATTTTTGTAGAGAGG
AGGGCTTGCTATGTTGCCAAGTCTGTCTCGAATTCCTGGGCTCAAGTGATACCTCCCTACCTAG
CCTCCCCAAATGCTGGGATTATAGGCATGCGCCACTGCGCTGGGCCTCCTAGTCCACTATTTCC
ATTCCTCTTTCACCAGACGGTTGTTTTACTTGTCAGGTTCGTGTGTGGTGCCTTTGCTTGGCCA
GTGGAGAACCACCAGAGCAGGGGCCAGTCCCTCCACCCTCAACTCAGCCTCCATCTGGCAGGGC
AATGGCCCCTTCCCTCAGATTGCCTGTCCCCTCGTGGTGCCTTCTCCTTCATCAGGCAACCTAT
AATTCTTGTGGAAGGGAGGGACGGCGTGTCCCCGGGCCCTCTGATGGTTCCCTTACCCTTAGGG
TGGACCAAATTGTGGGTCGGGGGCCCGGGGACAGGAAGGCCCGGGAGAAGGGCGACAAGGGGCC
CTCCGACGCGGAGGTGGTGGATGAAATCAGCATGATGGGACGCGTGGTCAAGGTGGAGAAGCAG
GTGAGTGTAGGATGGGGTGGCGGAGCTGGCCATACCAAGAAGCTCTGGGGGCCGCGGTGACATG
GGGAGGATGCGTTTCCCACAGCCACAGCCCAAGGGTCCCCGAGAAGACCTAAGAGCCCCCTCCC
CGGCCGAAGCCCCCGCCCTCGCCGCCAGACATTCCCATAAACCCGCCCTCTCCTGCTAAGCCCC
GCCCCCAGGCTGCATAAGCCCGCCCATAACCTTCAGATAAGCCTACCTCAGTTCCCCCTACTCC
ATTTGACCCCGCCTCTCAGTTGTCGCTGTAGCTCGCGGACTATCCCCATCGGTCACACCTAACC
ACCCCCCGGGTTATGCACCAGTGCCCAGCTTCGCCCCTCGCTCTAGCCAAGCTCCACCTTTCCA
GGCGGGATTTGTGCTTCCCAGATAAGCCCCGCCCACTCCACCGGCTAGGGTCCGCCCCGAGACC
CAAGCCCCGCCCCCGGCCGCGTCCCCTCCGGTCCCAGGCCCTGCTTCCCAGCTGCGCCCCGTCC
CCAGGTGCAGTCCATCGAGCACAAGCTGGACCTGCTGTTGGGCTTCTATTCGCGCTGCCTGCGC
TCTGGCACCTCGGCCAGCCTGGGCGCCGTGCAAGTGCCGCTGTTCGACCCCGACATCACCTCCG
ACTACCACAGCCCTGTGGACCACGAGGACATCTCCGTCTCCGCACAGACGCTCAGCATCTCCCG
CTCGGTCAGCACCAACATGGACTGAGGGACTTCTCAGAGGCAGGGCAGCACACGGCCAGCCCCG
CGGCCTGGCGCTCCGACTGCCCTCTGAGGCCTCCGGACTCCTCTCGTACTTGAACTCACTCCCT
CACGGGGAGAGAGACCACACGCAGTATTGAGCTGCCTGAGTGGGCGTGGTACCTGCTGTGGGTG
CCAGCGCCCCTTCCCCACCTCAGGAGCGTGAGATGCCAGGTCGCACAGAGGGCAGCAGCAGCGG
CCGTCCCGCGGCCTCTGGGCCCCCCAGTGCCCTGCCCACTCCATCAAGGCCCTATGTGGCCCAC
CTGGCAGGGGCACAGCCCCGGGAGTGGGAGCGGGCGCTGGGGCCCTGGGCCCTGACCCAGCTTC
CAGCTATGCAAGGTGAGGTCTCTGGCCCACCCTTCGGACACAGCAGGGAAGCCCTCCCGCCAAG
TCCCCGCCCCACTTGGGGGTGGGCCAAGGTGCCCCCACAGGTACCCACAAAGCACAGGACCCTG
CCACAAGGCAGGTGGACACCATATATGCAAACCATGTTAAATATGCAACTTTGGGGACCCCCAT
GGGGTCTCTCTGTCCCTCCCCCATTGGGAGCTGGGCCCCCAGCAGTAGCTGGTCTCAGGCTGCT
TGGCCACCACCCTGTCCCTATTCTTTGGCTTATCACTCCTTCCCCTCCCAGCATGGGGCCTGTT
TCTCCCCTGCCCTCTCCTAAGGGCAATGCCTGGGCCTTTCTTCCCATTTGCAAGTGTCAGCTCC
CAGGGGCTCCCTCCTCCTGCTGGGTGGCCACTCCCCTCCTTGGCCCTCCAGACACCACTCATAG
TCAGCACAGGTTTCTGTATCCTCCCCAAAACTCCCAGACAGTGCTTCGTGGACGATCGCACAAA
CATAGCCTTTTAGTTTCTCCAGACAGGAAGAAAGCCTCTCACACTTAAACATGCAATGAGGTGA
CACACTTGGAGACATGAGTGCAGAGCCACTCAGCCGCTCCTGGGCCTCTGCAGCAGATGCCAGT
GGACTGGCCTTGCAGGGTGACGACCACTAAGAGGAAGACCCCCAACTCCATCTGAGCAGGAGAA
GGAGCTTTGAAGTAACCCGAGAGCTCTCCAGGCCCCACCCAGACCTTTACCCGCTCCCCTTCTT
CAAGAAGATCTCCTCCTCTCTGGTCCAGGAGCCCTAACCCACTGCCTCTGCCTGTCCCCAAGGG
CCCGCCTCCGTGTCTCCACAGCACAACTCGGGCCCAGGCCTGACACCACTGGAGAGACCCCAGG
CCCACTTCTAGCCAGGCCTGTGCCTTCCTAGTCACTCTAACTCCCAGAGAGAATAAGAATGCAT
GTAATAGCTATACCAACCGCGCATCCGGCTTTCACATGCACTGTCTCCCCTCCCTCCACACCCC
ACTTCTTCACTTCAATTGGCAGCGCCACATCCAGGCGTCAGCCCCCATTCACTCCAGGAACACT
TTCTTATCCCCACCCCTTTGCTCCTCTTCTGCAAAGCCAATGCAGGTGGCAGGAAGGTGAGGGG
TAGTGGACCAATGGCAACCCTCTGTGGGAACAAGGGGCCGAGGCCACGCTGCCTGCATCTCGTG
CTGGGGACCTGCATGCGCCAGCACCAGGGCTTGGACTGGATCTTACTCAGTCCATGGTGCCCAG
CCTCTGCCCCAACATGCCCTCTGCATGTGACCGTCATGCCCTGGATGGAGCCACTCCTGGCTCA
CCCCACCTGCACTGCACTGTCCCCAGAGAGCCACCCCTCCACCCACTCAGAGACAGCTGTGGAG
AGGGCCAGGAGAATGGGATTACCCTATGACCAAGGAGACATGGGAAGAAGCCCTCCTTCCTTCC
ACGATCGAGGTTCCGCCATCAACTCGGTTCTCGGATATGCAAGTACCTCACTTTGTTAACTTAT
TAACTTATTGGTTTCATTAAAGTTTTCAAGAGGAGGTGATTGTTCTTGGTTTTGTTCAGTGGCT
GTGAGGTGAGGCTCCTGGTTTGGGGGTGGGGACAAGGAGATTTGGATTGGTCGGGACTCTTTGT
TGTATACAACAAAAACCCAACCCTGTATGGTTTAAACAGACAAACAAAAAGAAACTTATTGGCA
CAGAGAACTGAGAAGTCCAGGGGATAGATTTGGTTTCATGCACAGTGAGATCTAGATGCTTAAA
CGTGTCAGGACTCTTGTTTCCTGTAAGCCTTCCTTTCTGGCAGGCTGACCTCTCATGGTGACCA
GTAAAATTGGCCACCACTTTCCTAATAGTTTGCATCAGTCAAGATCAAGTCAGGAAGGCAGAAA
CAACACTAAGTTTTTCAGCAAAAGAATTTATTATAGGTAATGGGTTACACTGATGCAGGAGGGC
TGAAAGAACAAAAGAGAATTTTCTCTAGGTGATTCTGAGATAGCCTAGAGAAAATAACTGCAGA
AAGCAGTTACCACTCCCAGAGCTGCAAGAGTATAGGAAACAGGTTGGGGTTATCAGAACCCACA
AGCTTGCGGAGAGGGAGCCCGGTAGTGTTGGGGCTCAGAGATCTGAAAAGGAGGTACTCCCTGG
CTGGTGCTAGTACCTCTTAGGGGACACAATGAGGCTTGTCTGGGAGTATGGGAAAAAAGCCGAA
GTCTGGGATCAACTGTTGCAACCTGGCTGTTGCTGATAAGGATAGGAAGCAAAGGAAGAGAGAA
GTCTCCACTTTTCTTGCCTTCCAGTCTTCCCCTAGTACCCCTTATTGTCAAAGCTAGCGAACAA
AGGAGTGATGTGGTTTGCAGAGTCCCAGCCCCAGTATCACAGAGTTAGAAGGCTGCACTTGGAA
CTGAAAGACAATAACATGGGCACGGGCCACCCCTTTGGACACACAGTTTCCACAAACATCAATC
CATACATACTTGAACCGCCATATAACGACAGTAGCTTCCACCTAGTAAGATGAAACTGTCCTTT
ATACAAATGAAGACACTCTAGTCCCCTCCCCCTAAATGGGAAAAACACAACGTCCCACGGTTCA
ACAGATGCATCCATCTCCAGGGGTTAGTCACTGAATCCATATTTGGGTTAAGTATTCCTCTAAT
TCAGGCACAATTCCACCTAGAACTAAACACTAAAGTAAAGTTGATCATCACATACAATGTTTAT
ATAAAATATGGGAGAAAGGAGGAGGGAGGAAAAAATAATATGTACAGTGCACACACACACATGC
ACACACATCCCAAGCAAGGAAGGAAGTACGCATAGCCGCAATCGACCTCTTTCTGGTATCTCTG
GTCACAGTGCCATGGTTGGTATGAATAATTTCCTTATTCCATTGCCCTTCCATGTTTCCTTTGC
CCTCAGCCAACACCTCAGCTTTTTAGGGACCTTTTTTTTTTTTTTTTTTTGAGACAGAGTCTCG
CTTGGTTGCCAGGCTGGAATGTAGCGGTGCGATCTCAGCTCACTGCAACTTCCACCTCCTGGGT
TCAAGCGATTCTCCTGCCTTAGCCTCCCAAGTAGCTGGGACTACAGGCATGTGCCACCACACCC
AGCTAATTTTTGTATTTTTAGTAGAGATGGGGTTTCACCATGTTGGCCAGGATGGTCTTGATCT
CCTGATCTCGTGATCCACCTGCCTTGTCCTCCCAAAGTGCTGGGATTACAGGCGTGAGCCACCG
TGCCTGGCCAGGGATCTTTATATGGTGGAGTGACCCAGATAATCATTCCTGAAGGGTCTGAATC
CTCAGCGGTCCTGCATGGGTGGGTGTCACAGCTTTTCATTGACTTTTGCTATCATACATGGAAG
TACTTATTATAGAAAGGCCTTAGAGAATCCCTTGGGTTCCAGACTTAGTCCTCCTTGCCCTGTT
GTGTGGCAGCAACCAATTTCCGCTCGGTAATGAAGATCAGTCATGCAGCCAGTGTATTAACTCT
TTATTTTTCCTGCTGGTTGAGTGGCATGAGGAGCCCACAATGGCCTGGTT
EXEMPLARY HUMAN KCNQ4 TRANSCRIPT VARIANT 1 cDNA
SEQUENCE INCLUDING UNTRANSLATED REGIONS
(SEQ ID NO: 6)
GACATGTGAGCGGCGCGCGCCGGTGGCAGGTGGAAAGGCGAGCGGCATGGAGCGCGTAATAAGA
GAGTTGGAGTCGGAAAGAGCAGCCCCAGTCGCCGGGGAAGCGGGAGGTCAGTGCGGGCTCCGGC
GGCCCCCAGGCTCCGAGCGCCCGCCCGCGGCCCCGGCCCGGCCCCTAGCCCCCGCCGCCCGCGC
CCGCCCCGGGTCGCCCCTCTGGCCCCGGGTCCGAGCCATGCGTCTCTGAGCGCCCCGAGCGCGC
CCCCGCCCCGGACCGTGCCCGGGCCCCGGCGCCCCCAGCCCGGCGCCGCCCATGGCCGAGGCCC
CCCCGCGCCGCCTCGGCCTGGGTCCCCCGCCCGGGGACGCCCCCCGCGCGGAGCTAGTGGCGCT
CACGGCCGTGCAGAGCGAACAGGGCGAGGCGGGCGGGGGCGGCTCCCCGCGCCGCCTCGGCCTC
CTGGGCAGCCCCCTGCCGCCGGGCGCGCCCCTCCCTGGGCCGGGCTCCGGCTCGGGCTCCGCCT
GCGGCCAGCGCTCCTCGGCCGCGCACAAGCGCTACCGCCGCCTGCAGAACTGGGTCTACAACGT
GCTGGAGCGGCCCCGCGGCTGGGCCTTCGTCTACCACGTCTTCATATTTTTGCTGGTCTTCAGC
TGCCTGGTGCTGTCTGTGCTGTCCACTATCCAGGAGCACCAGGAACTTGCCAACGAGTGTCTCC
TCATCTTGGAATTCGTGATGATCGTGGTTTTCGGCTTGGAGTACATCGTCCGGGTCTGGTCCGC
CGGATGCTGCTGCCGCTACCGAGGATGGCAGGGTCGCTTCCGCTTTGCCAGAAAGCCCTTCTGT
GTCATCGACTTCATCGTGTTCGTGGCCTCGGTGGCCGTCATCGCCGCGGGTACCCAGGGCAACA
TCTTCGCCACGTCCGCGCTGCGCAGCATGCGCTTCCTGCAGATCCTGCGCATGGTGCGCATGGA
CCGCCGCGGCGGCACCTGGAAGCTGCTGGGCTCAGTGGTCTACGCGCATAGCAAGGAGCTGATC
ACCGCCTGGTACATCGGGTTCCTGGTGCTCATCTTCGCCTCCTTCCTGGTCTACCTGGCTGAGA
AGGACGCCAACTCCGACTTCTCCTCCTACGCCGACTCGCTCTGGTGGGGGACGATTACATTGAC
AACCATCGGCTATGGTGACAAGACACCGCACACATGGCTGGGCAGGGTCCTGGCTGCTGGCTTC
GCCTTACTGGGCATCTCTTTCTTTGCCCTGCCTGCCGGCATCCTAGGCTCCGGCTTTGCCCTGA
AGGTCCAGGAGCAGCACCGGCAGAAGCACTTCGAGAAGCGGAGGATGCCGGCAGCCAACCTCAT
CCAGGCTGCCTGGCGCCTGTACTCCACCGATATGAGCCGGGCCTACCTGACAGCCACCTGGTAC
TACTATGACAGTATCCTCCCATCCTTCAGAGAGCTGGCCCTCTTGTTTGAGCACGTGCAACGGG
CCCGCAATGGGGGCCTACGGCCCCTGGAGGTGCGGCGGGCGCCGGTACCCGACGGAGCACCCTC
CCGTTACCCGCCCGTTGCCACCTGCCACCGGCCGGGCAGCACCTCCTTCTGCCCTGGGGAAAGC
AGCCGGATGGGCATCAAAGACCGCATCCGCATGGGCAGCTCCCAGCGGCGGACGGGTCCTTCCA
AGCAGCATCTGGCACCTCCAACAATGCCCACCTCCCCAAGCAGCGAGCAGGTGGGTGAGGCCAC
CAGCCCCACCAAGGTGCAAAAGAGCTGGAGCTTCAATGACCGCACCCGCTTCCGGGCATCTCTG
AGACTCAAACCCCGCACCTCTGCTGAGGATGCCCCCTCAGAGGAAGTAGCAGAGGAGAAGAGCT
ACCAGTGTGAGCTCACGGTGGACGACATCATGCCTGCTGTGAAGACAGTCATCCGCTCCATCAG
GATTCTCAAGTTCCTGGTGGCCAAAAGGAAATTCAAGGAGACACTGCGACCGTACGACGTGAAG
GACGTCATTGAGCAGTACTCAGCAGGCCACCTGGACATGCTGGGCCGGATCAAGAGCCTGCAAA
CTCGGGTGGACCAAATTGTGGGTCGGGGGCCCGGGGACAGGAAGGCCCGGGAGAAGGGCGACAA
GGGGCCCTCCGACGCGGAGGTGGTGGATGAAATCAGCATGATGGGACGCGTGGTCAAGGTGGAG
AAGCAGGTGCAGTCCATCGAGCACAAGCTGGACCTGCTGTTGGGCTTCTATTCGCGCTGCCTGC
GCTCTGGCACCTCGGCCAGCCTGGGCGCCGTGCAAGTGCCGCTGTTCGACCCCGACATCACCTC
CGACTACCACAGCCCTGTGGACCACGAGGACATCTCCGTCTCCGCACAGACGCTCAGCATCTCC
CGCTCGGTCAGCACCAACATGGACTGAGGGACTTCTCAGAGGCAGGGCAGCACACGGCCAGCCC
CGCGGCCTGGCGCTCCGACTGCCCTCTGAGGCCTCCGGACTCCTCTCGTACTTGAACTCACTCC
CTCACGGGGAGAGAGACCACACGCAGTATTGAGCTGCCTGAGTGGGCGTGGTACCTGCTGTGGG
TGCCAGCGCCCCTTCCCCACCTCAGGAGCGTGAGATGCCAGGTCGCACAGAGGGCAGCAGCAGC
GGCCGTCCCGCGGCCTCTGGGCCCCCCAGTGCCCTGCCCACTCCATCAAGGCCCTATGTGGCCC
ACCTGGCAGGGGCACAGCCCCGGGAGTGGGAGCGGGCGCTGGGGCCCTGGGCCCTGACCCAGCT
TCCAGCTATGCAAGGTGAGGTCTCTGGCCCACCCTTCGGACACAGCAGGGAAGCCCTCCCGCCA
AGTCCCCGCCCCACTTGGGGGTGGGCCAAGGTGCCCCCACAGGTACCCACAAAGCACAGGACCC
TGCCACAAGGCAGGTGGACACCATATATGCAAACCATGTTAAATATGCAACTTTGGGGACCCCC
ATGGGGTCTCTCTGTCCCTCCCCCATTGGGAGCTGGGCCCCCAGCAGTAGCTGGTCTCAGGCTG
CTTGGCCACCACCCTGTCCCTATTCTTTGGCTTATCACTCCTTCCCCTCCCAGCATGGGGCCTG
TTTCTCCCCTGCCCTCTCCTAAGGGCAATGCCTGGGCCTTTCTTCCCATTTGCAAGTGTCAGCT
CCCAGGGGCTCCCTCCTCCTGCTGGGTGGCCACTCCCCTCCTTGGCCCTCCAGACACCACTCAT
AGTCAGCACAGGTTTCTGTATCCTCCCCAAAACTCCCAGACAGTGCTTCGTGGACGATCGCACA
AACATAGCCTTTTAGTTTCTCCAGACAGGAAGAAAGCCTCTCACACTTAAACATGCAATGAGGT
GACACACTTGGAGACATGAGTGCAGAGCCACTCAGCCGCTCCTGGGCCTCTGCAGCAGATGCCA
GTGGACTGGCCTTGCAGGGTGACGACCACTAAGAGGAAGACCCCCAACTCCATCTGAGCAGGAG
AAGGAGCTTTGAAGTAACCCGAGAGCTCTCCAGGCCCCACCCAGACCTTTACCCGCTCCCCTTC
TTCAAGAAGATCTCCTCCTCTCTGGTCCAGGAGCCCTAACCCACTGCCTCTGCCTGTCCCCAAG
GGCCCGCCTCCGTGTCTCCACAGCACAACTCGGGCCCAGGCCTGACACCACTGGAGAGACCCCA
GGCCCACTTCTAGCCAGGCCTGTGCCTTCCTAGTCACTCTAACTCCCAGAGAGAATAAGAATGC
ATGTAATAGCTATACCAACCGCGCATCCGGCTTTCACATGCACTGTCTCCCCTCCCTCCACACC
CCACTTCTTCACTTCAATTGGCAGCGCCACATCCAGGCGTCAGCCCCCATTCACTCCAGGAACA
CTTTCTTATCCCCACCCCTTTGCTCCTCTTCTGCAAAGCCAATGCAGGTGGCAGGAAGGTGAGG
GGTAGTGGACCAATGGCAACCCTCTGTGGGAACAAGGGGCCGAGGCCACGCTGCCTGCATCTCG
TGCTGGGGACCTGCATGCGCCAGCACCAGGGCTTGGACTGGATCTTACTCAGTCCATGGTGCCC
AGCCTCTGCCCCAACATGCCCTCTGCATGTGACCGTCATGCCCTGGATGGAGCCACTCCTGGCT
CACCCCACCTGCACTGCACTGTCCCCAGAGAGCCACCCCTCCACCCACTCAGAGACAGCTGTGG
AGAGGGCCAGGAGAATGGGATTACCCTATGACCAAGGAGACATGGGAAGAAGCCCTCCTTCCTT
CCACGATCGAGGTTCCGCCATCAACTCGGTTCTCGGATATGCAAGTACCTCACTTTGTTAACTT
ATTAACTTATTGGTTTCATTAAAGTTTTCAAGAGGA
EXEMPLARY HUMAN KCNQ4 TRANSCRIPT VARIANT 2 cDNA
SEQUENCE INCLUDING UNTRANSLATED REGIONS
(SEQ ID NO: 7)
GACATGTGAGCGGCGCGCGCCGGTGGCAGGTGGAAAGGCGAGCGGCATGGAGCGCGTAATAAGA
GAGTTGGAGTCGGAAAGAGCAGCCCCAGTCGCCGGGGAAGCGGGAGGTCAGTGCGGGCTCCGGC
GGCCCCCAGGCTCCGAGCGCCCGCCCGCGGCCCCGGCCCGGCCCCTAGCCCCCGCCGCCCGCGC
CCGCCCCGGGTCGCCCCTCTGGCCCCGGGTCCGAGCCATGCGTCTCTGAGCGCCCCGAGCGCGC
CCCCGCCCCGGACCGTGCCCGGGCCCCGGCGCCCCCAGCCCGGCGCCGCCCATGGCCGAGGCCC
CCCCGCGCCGCCTCGGCCTGGGTCCCCCGCCCGGGGACGCCCCCCGCGCGGAGCTAGTGGCGCT
CACGGCCGTGCAGAGCGAACAGGGCGAGGCGGGCGGGGGCGGCTCCCCGCGCCGCCTCGGCCTC
CTGGGCAGCCCCCTGCCGCCGGGCGCGCCCCTCCCTGGGCCGGGCTCCGGCTCGGGCTCCGCCT
GCGGCCAGCGCTCCTCGGCCGCGCACAAGCGCTACCGCCGCCTGCAGAACTGGGTCTACAACGT
GCTGGAGCGGCCCCGCGGCTGGGCCTTCGTCTACCACGTCTTCATATTTTTGCTGGTCTTCAGC
TGCCTGGTGCTGTCTGTGCTGTCCACTATCCAGGAGCACCAGGAACTTGCCAACGAGTGTCTCC
TCATCTTGGAATTCGTGATGATCGTGGTTTTCGGCTTGGAGTACATCGTCCGGGTCTGGTCCGC
CGGATGCTGCTGCCGCTACCGAGGATGGCAGGGTCGCTTCCGCTTTGCCAGAAAGCCCTTCTGT
GTCATCGACTTCATCGTGTTCGTGGCCTCGGTGGCCGTCATCGCCGCGGGTACCCAGGGCAACA
TCTTCGCCACGTCCGCGCTGCGCAGCATGCGCTTCCTGCAGATCCTGCGCATGGTGCGCATGGA
CCGCCGCGGCGGCACCTGGAAGCTGCTGGGCTCAGTGGTCTACGCGCATAGCAAGGAGCTGATC
ACCGCCTGGTACATCGGGTTCCTGGTGCTCATCTTCGCCTCCTTCCTGGTCTACCTGGCTGAGA
AGGACGCCAACTCCGACTTCTCCTCCTACGCCGACTCGCTCTGGTGGGGGACGATTACATTGAC
AACCATCGGCTATGGTGACAAGACACCGCACACATGGCTGGGCAGGGTCCTGGCTGCTGGCTTC
GCCTTACTGGGCATCTCTTTCTTTGCCCTGCCTGCCGGCATCCTAGGCTCCGGCTTTGCCCTGA
AGGTCCAGGAGCAGCACCGGCAGAAGCACTTCGAGAAGCGGAGGATGCCGGCAGCCAACCTCAT
CCAGGCTGCCTGGCGCCTGTACTCCACCGATATGAGCCGGGCCTACCTGACAGCCACCTGGTAC
TACTATGACAGTATCCTCCCATCCTTCAGCAGCCGGATGGGCATCAAAGACCGCATCCGCATGG
GCAGCTCCCAGCGGCGGACGGGTCCTTCCAAGCAGCATCTGGCACCTCCAACAATGCCCACCTC
CCCAAGCAGCGAGCAGGTGGGTGAGGCCACCAGCCCCACCAAGGTGCAAAAGAGCTGGAGCTTC
AATGACCGCACCCGCTTCCGGGCATCTCTGAGACTCAAACCCCGCACCTCTGCTGAGGATGCCC
CCTCAGAGGAAGTAGCAGAGGAGAAGAGCTACCAGTGTGAGCTCACGGTGGACGACATCATGCC
TGCTGTGAAGACAGTCATCCGCTCCATCAGGATTCTCAAGTTCCTGGTGGCCAAAAGGAAATTC
AAGGAGACACTGCGACCGTACGACGTGAAGGACGTCATTGAGCAGTACTCAGCAGGCCACCTGG
ACATGCTGGGCCGGATCAAGAGCCTGCAAACTCGGGTGGACCAAATTGTGGGTCGGGGGCCCGG
GGACAGGAAGGCCCGGGAGAAGGGCGACAAGGGGCCCTCCGACGCGGAGGTGGTGGATGAAATC
AGCATGATGGGACGCGTGGTCAAGGTGGAGAAGCAGGTGCAGTCCATCGAGCACAAGCTGGACC
TGCTGTTGGGCTTCTATTCGCGCTGCCTGCGCTCTGGCACCTCGGCCAGCCTGGGCGCCGTGCA
AGTGCCGCTGTTCGACCCCGACATCACCTCCGACTACCACAGCCCTGTGGACCACGAGGACATC
TCCGTCTCCGCACAGACGCTCAGCATCTCCCGCTCGGTCAGCACCAACATGGACTGAGGGACTT
CTCAGAGGCAGGGCAGCACACGGCCAGCCCCGCGGCCTGGCGCTCCGACTGCCCTCTGAGGCCT
CCGGACTCCTCTCGTACTTGAACTCACTCCCTCACGGGGAGAGAGACCACACGCAGTATTGAGC
TGCCTGAGTGGGCGTGGTACCTGCTGTGGGTGCCAGCGCCCCTTCCCCACCTCAGGAGCGTGAG
ATGCCAGGTCGCACAGAGGGCAGCAGCAGCGGCCGTCCCGCGGCCTCTGGGCCCCCCAGTGCCC
TGCCCACTCCATCAAGGCCCTATGTGGCCCACCTGGCAGGGGCACAGCCCCGGGAGTGGGAGCG
GGCGCTGGGGCCCTGGGCCCTGACCCAGCTTCCAGCTATGCAAGGTGAGGTCTCTGGCCCACCC
TTCGGACACAGCAGGGAAGCCCTCCCGCCAAGTCCCCGCCCCACTTGGGGGTGGGCCAAGGTGC
CCCCACAGGTACCCACAAAGCACAGGACCCTGCCACAAGGCAGGTGGACACCATATATGCAAAC
CATGTTAAATATGCAACTTTGGGGACCCCCATGGGGTCTCTCTGTCCCTCCCCCATTGGGAGCT
GGGCCCCCAGCAGTAGCTGGTCTCAGGCTGCTTGGCCACCACCCTGTCCCTATTCTTTGGCTTA
TCACTCCTTCCCCTCCCAGCATGGGGCCTGTTTCTCCCCTGCCCTCTCCTAAGGGCAATGCCTG
GGCCTTTCTTCCCATTTGCAAGTGTCAGCTCCCAGGGGCTCCCTCCTCCTGCTGGGTGGCCACT
CCCCTCCTTGGCCCTCCAGACACCACTCATAGTCAGCACAGGTTTCTGTATCCTCCCCAAAACT
CCCAGACAGTGCTTCGTGGACGATCGCACAAACATAGCCTTTTAGTTTCTCCAGACAGGAAGAA
AGCCTCTCACACTTAAACATGCAATGACGTGACACACTTGGAGACATGAGTGCAGAGCCACTCA
GCCGCTCCTGGGCCTCTGCAGCAGATGCCAGTGGACTGGCCTTGCAGGGTGACGACCACTAAGA
GGAAGACCCCCAACTCCATCTGAGCAGGAGAAGGAGCTTTGAAGTAACCCGAGAGCTCTCCAGG
CCCCACCCAGACCTTTACCCGCTCCCCTTCTTCAAGAAGATCTCCTCCTCTCTGGTCCAGGAGC
CCTAACCCACTGCCTCTGCCTGTCCCCAAGGGCCCGCCTCCGTGTCTCCACAGCACAACTCGGG
CCCAGGCCTGACACCACTGGAGAGACCCCAGGCCCACTTCTAGCCAGGCCTGTGCCTTCCTAGT
CACTCTAACTCCCAGAGAGAATAAGAATGCATGTAATAGCTATACCAACCGCGCATCCGGCTTT
CACATGCACTGTCTCCCCTCCCTCCACACCCCACTTCTTCACTTCAATTGGCAGCGCCACATCC
AGGCGTCAGCCCCCATTCACTCCAGGAACACTTTCTTATCCCCACCCCTTTGCTCCTCTTCTGC
AAAGCCAATGCAGGTGGCAGGAAGGTGAGGGGTAGTGGACCAATGGCAACCCTCTGTGGGAACA
AGGGGCCGAGGCCACGCTGCCTGCATCTCGTGCTGGGGACCTGCATGCGCCAGCACCAGGGCTT
GGACTGGATCTTACTCAGTCCATGGTGCCCAGCCTCTGCCCCAACATGCCCTCTGCATGTGACC
GTCATGCCCTGGATGGAGCCACTCCTGGCTCACCCCACCTGCACTGCACTGTCCCCAGAGAGCC
ACCCCTCCACCCACTCAGAGACAGCTGTGGAGAGGGCCAGGAGAATGGGATTACCCTATGACCA
AGGAGACATGGGAAGAAGCCCTCCTTCCTTCCACGATCGAGGTTCCGCCATCAACTCGGTTCTC
GGATATGCAAGTACCTCACTTTGTTAACTTATTAACTTATTGGTTTCATTAAAGTTTTCAAGAG
GA
EXEMPLARY HUMAN KCNQ4 TRANSCRIPT X1 cDNA SEQUENCE
INCLUDING UNTRANSLATED REGIONS
(SEQ ID NO: 8)
GACCACTCGTACCACAAAGTGGGCAGCTGAGGAGCTGATCACCGCCTGGTACATCGGGTTCCTG
GTGCTCATCTTCGCCTCCTTCCTGGTCTACCTGGCTGAGAAGGACGCCAACTCCGACTTCTCCT
CCTACGCCGACTCGCTCTGGTGGGGGACGATTACATTGACAACCATCGGCTATGGTGACAAGAC
ACCGCACACATGGCTGGGCAGGGTCCTGGCTGCTGGCTTCGCCTTACTGGGCATCTCTTTCTTT
GCCCTGCCTGCCGGCATCCTAGGCTCCGGCTTTGCCCTGAAGGTCCAGGAGCAGCACCGGCAGA
AGCACTTCGAGAAGCGGAGGATGCCGGCAGCCAACCTCATCCAGGCTGCCTGGCGCCTGTACTC
CACCGATATGAGCCGGGCCTACCTGACAGCCACCTGGTACTACTATGACAGTATCCTCCCATCC
TTCAGAGAGCTGGCCCTCTTGTTTGAGCACGTGCAACGGGCCCGCAATGGGGGCCTACGGCCCC
TGGAGGTGCGGCGGGCGCCGGTACCCGACGGAGCACCCTCCCGTTACCCGCCCGTTGCCACCTG
CCACCGGCCGGGCAGCACCTCCTTCTGCCCTGGGGAAAGCAGCCGGATGGGCATCAAAGACCGC
ATCCGCATGGGCAGCTCCCAGCGGCGGACGGGTCCTTCCAAGCAGCATCTGGCACCTCCAACAA
TGCCCACCTCCCCAAGCAGCGAGCAGGTGGGTGAGGCCACCAGCCCCACCAAGGTGCAAAAGAG
CTGGAGCTTCAATGACCGCACCCGCTTCCGGGCATCTCTGAGACTCAAACCCCGCACCTCTGCT
GAGGATGCCCCCTCAGAGGAAGTAGCAGAGGAGAAGAGCTACCAGTGTGAGCTCACGGTGGACG
ACATCATGCCTGCTGTGAAGACAGTCATCCGCTCCATCAGGATTCTCAAGTTCCTGGTGGCCAA
AAGGAAATTCAAGGAGACACTGCGACCGTACGACGTGAAGGACGTCATTGAGCAGTACTCAGCA
GGCCACCTGGACATGCTGGGCCGGATCAAGAGCCTGCAAACTCGGGTGGACCAAATTGTGGGTC
GGGGGCCCGGGGACAGGAAGGCCCGGGAGAAGGGCGACAAGGGGCCCTCCGACGCGGAGGTGGT
GGATGAAATCAGCATGATGGGACGCGTGGTCAAGGTGGAGAAGCAGGTGCAGTCCATCGAGCAC
AAGCTGGACCTGCTGTTGGGCTTCTATTCGCGCTGCCTGCGCTCTGGCACCTCGGCCAGCCTGG
GCGCCGTGCAAGTGCCGCTGTTCGACCCCGACATCACCTCCGACTACCACAGCCCTGTGGACCA
CGAGGACATCTCCGTCTCCGCACAGACGCTCAGCATCTCCCGCTCGGTCAGCACCAACATGGAC
TGAGGGACTTCTCAGAGGCAGGGCAGCACACGGCCAGCCCCGCGGCCTGGCGCTCCGACTGCCC
TCTGAGGCCTCCGGACTCCTCTCGTACTTGAACTCACTCCCTCACGGGGAGAGAGACCACACGC
AGTATTGAGCTGCCTGAGTGGGCGTGGTACCTGCTGTGGGTGCCAGCGCCCCTTCCCCACCTCA
GGAGCGTGAGATGCCAGGTCGCACAGAGGGCAGCAGCAGCGGCCGTCCCGCGGCCTCTGGGCCC
CCCAGTGCCCTGCCCACTCCATCAAGGCCCTATGTGGCCCACCTGGCAGGGGCACAGCCCCGGG
AGTGGGAGCGGGCGCTGGGGCCCTGGGCCCTGACCCAGCTTCCAGCTATGCAAGGTGAGGTCTC
TGGCCCACCCTTCGGACACAGCAGGGAAGCCCTCCCGCCAAGTCCCCGCCCCACTTGGGGGTGG
GCCAAGGTGCCCCCACAGGTACCCACAAAGCACAGGACCCTGCCACAAGGCAGGTGGACACCAT
ATATGCAAACCATGTTAAATATGCAACTTTGGGGACCCCCATGGGGTCTCTCTGTCCCTCCCCC
ATTGGGAGCTGGGCCCCCAGCAGTAGCTGGTCTCAGGCTGCTTGGCCACCACCCTGTCCCTATT
CTTTGGCTTATCACTCCTTCCCCTCCCAGCATGGGGCCTGTTTCTCCCCTGCCCTCTCCTAAGG
GCAATGCCTGGGCCTTTCTTCCCATTTGCAAGTGTCAGCTCCCAGGGGCTCCCTCCTCCTGCTG
GGTGGCCACTCCCCTCCTTGGCCCTCCAGACACCACTCATAGTCAGCACAGGTTTCTGTATCCT
CCCCAAAACTCCCAGACAGTGCTTCGTGGACGATCGCACAAACATAGCCTTTTAGTTTCTCCAG
ACAGGAAGAAAGCCTCTCACACTTAAACATGCAATGAGGTGACACACTTGGAGACATGAGTGCA
GAGCCACTCAGCCGCTCCTGGGCCTCTGCAGCAGATGCCAGTGGACTGGCCTTGCAGGGTGACG
ACCACTAAGAGGAAGACCCCCAACTCCATCTGAGCAGGAGAAGGAGCTTTGAAGTAACCCGAGA
GCTCTCCAGGCCCCACCCAGACCTTTACCCGCTCCCCTTCTTCAAGAAGATCTCCTCCTCTCTG
GTCCAGGAGCCCTAACCCACTGCCTCTGCCTGTCCCCAAGGGCCCGCCTCCGTGTCTCCACAGC
ACAACTCGGGCCCAGGCCTGACACCACTGGAGAGACCCCAGGCCCACTTCTAGCCAGGCCTGTG
CCTTCCTAGTCACTCTAACTCCCAGAGAGAATAAGAATGCATGTAATAGCTATACCAACCGCGC
ATCCGGCTTTCACATGCACTGTCTCCCCTCCCTCCACACCCCACTTCTTCACTTCAATTGGCAG
CGCCACATCCAGGCGTCAGCCCCCATTCACTCCAGGAACACTTTCTTATCCCCACCCCTTTGCT
CCTCTTCTGCAAAGCCAATGCAGGTGGCAGGAAGGTGAGGGGTAGTGGACCAATGGCAACCCTC
TGTGGGAACAAGGGGCCGAGGCCACGCTGCCTGCATCTCGTGCTGGGGACCTGCATGCGCCAGC
ACCAGGGCTTGGACTGGATCTTACTCAGTCCATGGTGCCCAGCCTCTGCCCCAACATGCCCTCT
GCATGTGACCGTCATGCCCTGGATGGAGCCACTCCTGGCTCACCCCACCTGCACTGCACTGTCC
CCAGAGAGCCACCCCTCCACCCACTCAGAGACAGCTGTGGAGAGGGCCAGGAGAATGGGATTAC
CCTATGACCAAGGAGACATGGGAAGAAGCCCTCCTTCCTTCCACGATCGAGGTTCCGCCATCAA
CTCGGTTCTCGGATATGCAAGTACCTCACTTTGTTAACTTATTAACTTATTGGTTTCATTAAAG
TTTTCAAGAGGAGGTGA
KCNQ4 (codon optimized; minimizes gRNA binding)
(SEQ ID NO: 9)
ATGGCTGAAGCCCCTCCTAGAAGGCTTGGACTGGGACCTCCTCCTGGGGATGCTCCTAGAGCTG
AACTGGTGGCTCTGACAGCCGTGCAGTCTGAACAAGGCGAAGCTGGTGGCGGCGGATCTCCACG
TAGACTTGGACTGCTGGGAAGCCCTCTTCCTCCTGGTGCTCCACTTCCTGGACCTGGCAGTGGA
TCTGGATCTGCCTGTGGCCAGAGAAGCTCTGCCGCTCACAAGAGATACCGGCGGCTGCAGAACT
GGGTGTACAACGTGCTGGAAAGACCCAGAGGCTGGGCCTTCGTGTACCACGTGTTCATCTTTCT
GCTGGTGTTCAGCTGCCTGGTGCTGTCCGTGCTGAGCACCATCCAAGAACATCAAGAGCTGGCT
AACGAGTGCCTGTTAATACTGGAGTTTGTGATGATTGTGGTGTTCGGCCTCGAGTACATCGTCC
GCGTTTGGAGCGCCGGCTGCTGCTGCAGATATAGAGGTTGGCAAGGCAGATTCCGCTTCGCCAG
AAAGCCCTTCTGCGTGATCGACTTCATCGTGTTCGTGGCCAGCGTGGCCGTGATTGCTGCTGGC
ACACAGGGCAACATCTTCGCCACAAGCGCCCTGCGGAGCATGCGGTTTCTGCAGATCCTGAGAA
TGGTCCGAATGGACAGAAGAGGCGGCACCTGGAAGCTGCTGGGCTCTGTGGTGTACGCCCACAG
CAAAGAGCTGATCACCGCCTGGTACATCGGATTTCTGGTGCTGATCTTCGCCTCCTTCCTGGTG
TACCTGGCCGAGAAGGACGCCAACAGCGACTTTAGCAGCTACGCCGACTCTCTTTGGTGGGGCA
CCATCACACTGACCACCATCGGCTACGGCGACAAGACCCCTCACACATGGCTGGGAAGAGTGCT
GGCCGCTGGATTTGCTCTGCTGGGCATCAGCTTTTTCGCCCTGCCTGCCGGAATCCTCGGATCT
GGCTTTGCCCTGAAGGTGCAAGAGCAGCACCGGCAGAAGCACTTCGAGAAGAGAAGAATGCCTG
CCGCCAACCTGATTCAGGCCGCTTGGAGACTGTACAGCACCGACATGAGCAGAGCCTACCTGAC
CGCCACGTGGTATTATTACGACTCGATCCTGCCTAGCTTCCGCGAACTGGCCCTGCTGTTTGAG
CATGTGCAGAGAGCCAGAAACGGCGGCCTCAGACCTCTGGAAGTTCGGAGAGCACCTGTGCCTG
ATGGCGCCCCTTCTAGATATCCTCCAGTGGCCACCTGTCACAGACCCGGCAGCACATCTTTTTG
CCCTGGCGAGTCTAGCCGGATGGGCATCAAGGACAGAATCAGAATGGGCAGCAGCCAGCGGAGA
ACAGGCCCTTCTAAACAGCATCTGGCCCCTCCAACCATGCCTACAAGCCCTAGCTCTGAGCAAG
TGGGCGAAGCCACCTCTCCTACCAAGGTGCAGAAGTCCTGGTCCTTCAACGACCGGACCAGATT
CAGAGCCAGCCTGAGACTGAAGCCCAGAACCTCTGCCGAGGATGCCCCTTCTGAAGAGGTGGCC
GAAGAGAAGTCCTACCAGTGCGAGCTGACCGTGGACGACATCATGCCAGCCGTGAAAACCGTGA
TACGGTCTATCCGGATCCTGAAGTTCCTGGTGGCCAAGCGGAAGTTCAAAGAGACACTGCGGCC
CTACGACGTGAAGGACGTGATCGAGCAGTATTCTGCCGGCCACCTGGACATGCTGGGCAGAATC
AAGAGCCTGCAGACCAGAGTGGACCAGATCGTTGGAAGAGGCCCAGGCGACAGAAAGGCCAGAG
AGAAGGGCGATAAGGGCCCATCTGATGCCGAGGTTGTCGACGAGATATCAATGATGGGCAGAGT
GGTCAAGGTGGAAAAACAGGTGCAGAGCATCGAGCACAAGCTGGACCTGCTGCTGGGATTCTAC
AGCCGGTGTCTGAGAAGCGGCACATCTGCATCTCTGGGCGCTGTGCAGGTCCCACTGTTCGACC
CTGATATCACCAGCGACTATCACAGCCCCGTGGACCACGAGGACATCTCCGTTTCTGCTCAGAC
CCTGAGCATGAGCAGATCCGTGTCCACCAACATGGAG
KCNQ4 (codon-optimized to resist miRNA-mediated degradation)
(SEQ ID NO: 10)
ATGGCTGAAGCCCCTCCTAGAAGGCTTGGACTGGGACCTCCTCCTGGGGATGCTCCTAGAGCTG
AACTGGTGGCTCTGACAGCCGTGCAGTCTGAACAAGGCGAAGCTGGTGGCGGCGGATCTCCACG
TAGACTTGGACTGCTGGGAAGCCCTCTTCCTCCTGGTGCTCCACTTCCTGGACCTGGCAGTGGA
TCTGGATCTGCCTGTGGCCAGAGAAGCTCTGCCGCTCACAAGAGATACCGGCGGCTGCAGAACT
GGGTGTACAACGTGCTGGAAAGACCCAGAGGCTGGGCCTTCGTGTACCACGTGTTCATCTTTCT
GCTGGTGTTCAGCTGCCTGGTGCTGTCCGTGCTGAGCACCATCCAAGAACATCAAGAGCTGGCT
AACGAGTGCCTGTTAATACTGGAGTTTGTGATGATTGTGGTGTTCGGCCTCGAGTACATCGTCC
GCGTTTGGAGCGCCGGCTGCTGCTGCAGATATAGAGGTTGGCAAGGCAGATTCCGCTTCGCCAG
AAAGCCCTTCTGCGTGATCGACTTCATCGTGTTCGTGGCCAGCGTGGCCGTGATTGCTGCTGGC
ACACAGGGCAACATCTTCGCCACAAGCGCCCTGCGGAGCATGCGGTTTCTGCAGATCCTGAGAA
TGGTCCGAATGGACAGAAGAGGCGGCACCTGGAAGCTGCTGGGCTCTGTGGTGTACGCCCACAG
CAAAGAGCTGATCACCGCCTGGTACATCGGATTTCTGGTGCTGATCTTCGCCTCCTTCCTGGTG
TACCTGGCCGAGAAGGACGCCAACAGCGACTTTAGCAGCTACGCCGACTCTCTTTGGTGGGGCA
CCATCACACTGACCACCATCGGCTACGGCGACAAGACCCCTCACACATGGCTGGGAAGAGTGCT
GGCCGCTGGATTTGCTCTGCTGGGCATCAGCTTTTTCGCCCTGCCTGCCGGAATCCTCGGATCT
GGCTTTGCCCTGAAGGTGCAAGAGCAGCATAGACAAAAGCATTTTGAAAAGAGAAGAATGCCTG
CCGCCAACCTGATTCAGGCCGCTTGGAGACTGTACAGCACCGACATGAGCAGAGCCTACCTGAC
CGCCACGTGGTATTATTACGATTCGATCCTGCCTAGCTTCCGCGAACTGGCCCTGCTGTTTGAG
CATGTGCAGAGAGCCAGAAACGGCGGCCTCAGACCTCTGGAAGTTCGGAGAGCACCTGTGCCTG
ATGGCGCCCCTTCTAGATATCCTCCAGTGGCCACCTGTCACAGACCCGGCAGCACATCTTTTTG
CCCTGGCGAGTCTAGCCGGATGGGCATCAAGGACAGAATCAGAATGGGCAGCAGCCAGCGGAGA
ACAGGCCCTTCTAAACAGCATCTGGCCCCTCCAACCATGCCTACAAGCCCTAGCTCTGAGCAAG
TGGGCGAAGCCACCTCTCCTACCAAGGTGCAGAAGTCCTGGTCCTTCAACGACCGGACCAGATT
TAGAGCCAGCCTCCGGCTGAAGCCCAGAACCTCTGCCGAGGATGCCCCTTCTGAAGAGGTGGCC
GAAGAGAAGTCCTACCAGTGCGAGCTGACCGTGGACGACATCATGCCAGCCGTGAAAACCGTGA
TAAGGTCTATACGCATCCTGAAGTTCCTGGTGGCCAAGCGGAAGTTCAAAGAGACACTGCGGCC
CTACGACGTGAAGGACGTGATCGAGCAGTATTCTGCCGGCCACCTGGACATGCTGGGCAGAATC
AAGAGCCTGCAGACCAGAGTGGACCAGATCGTTGGAAGAGGCCCAGGCGACAGAAAGGCCAGAG
AGAAGGGCGATAAGGGCCCATCTGATGCCGAGGTTGTCGACGAGATATCAATGATGGGCAGAGT
CGTGAAAGTCGAAAAACAGGTGCAGAGCATCGAGCACAAGCTGGACCTGCTGCTGGGATTCTAC
AGCCGGTGTCTGAGAAGCGGCACATCTGCATCTCTGGGCGCTGTGCAGGTCCCACTGTTCGATC
CTGATATTACGAGCGATTATCACAGCCCCGTGGACCACGAGGACATCTCCGTTTCTGCTCAGAC
CCTGAGCATCAGCAGATCCGTGTCCACCAACATGGAC
EXEMPLARY MOUSE KCNQ4 MEMBER 4 cDNA CODING SEQUENCE
(SEQ ID NO: 91)
ATGGCCGAGGCCCCCCCGCGCCGCCTCGGCCTGGGCCCCCCGCCCGGGGACGCCCCCCGCGCGG
AGTTGGTGGCGCTCACGGCCGTGCAGAGTGAACAGGGCGAGGCGGGCGGGGGCGGCTCTCCGCG
TCGCCTCGGCCTTCTGGGCAGCCCCCTGCCGCCGGGCGCGCCCCTCCCTGGGCCGGGCTCCGGC
TCGGGCTCCGCCTGCGGCGGCCAGCGCTCCTCCGCCGCGCAGAAGCGCTACCGCCGCCTGCAGA
ACTGGGTCTACAACGTGCTGGAGCGGCCCCGCGGGTGGGCCTTCGTCTACCACGTCTTCATATT
TTTGCTAGTCTTCAGCTGCCTGGTGCTGTCTGTACTGTCCACCATCCAGGAGCACCAGGAACTT
GCCAACGAGTGTCTCCTTATCTTGGAATTCGTGATGATTGTGGTCTTTGGCTTGGAGTATATAA
TCCGTGTCTGGTCGGCCGGATGCTGTTGTCGCTACAGAGGATGGCAGGGACGCTTTCGCTTCGC
CAGGAAACCCTTCTGTGTCATCGACTTCATCGTGTTCGTGGCCTCGGTGGCAGTGATAGCTGCG
GGCACACAAGGCAACATCTTTGCTACGTCCGCGTTGCGCAGTATGCGCTTCCTACAGATCCTGC
GCATGGTGCGTATGGATCGCCGCGGTGGCACCTGGAAGCTGTTGGGATCCGTGGTCTATGCGCA
CAGTAAGGAGCTGATCACCGCCTGGTACATCGGGTTCCTGGTGCTCATCTTTGCCTCTTTCCTG
GTCTACCTGGCTGAGAAGGATGCCAACTCTGACTTCTCCTCCTATGCCGACTCGCTCTGGTGGG
GGACGATCACACTGACGACCATTGGCTATGGTGACAAGACGCCACATACATGGCTGGGCAGGGT
TCTGGCTGCCGGCTTCGCCTTACTGGGCATCTCCTTCTTTGCCCTGCCTGCCGGCATCCTGGGC
TCTGGCTTTGCCCTGAAGGTCCAGGAGCAGCACAGGCAGAAGCACTTTGAGAAGCGCAGGATGC
CAGCAGCTAATCTCATCCAGGCTGCGTGGCGCCTGTACTCCACGGACACAAGCCGGGCCTATTT
GACAGCCACCTGGTATTACTATGACAGCATTCTCCCATCTTTCAGAGAGCTGGCCCTCTTGTTT
GAGCACATACAACGGGCCCGCAATGGGGGCTTACGGCCCCTGGAGGTGAGGCGGGCGCCAGTAC
CTGATGGAGCGCCCTCTCGCTACCCGCCCGTTGCCACCTGCCACCGGCCAGGCAGTGCCTCCTT
CTGCCCTGGGGAAAGCAGCCGGATGGGCATCAAAGACCGAATCCGCATAAGCAGCTCCCAGAAG
CGGACAGGCCCCTCCAAGCAGCATCTGGCCCCTCCGCCGATTCCCACCTCGCCAAGCAGTGAGC
AGGTGGGCGAGGCATCCAGCCCCAGCAAGGTGCAGAAAAGCTGGAGCTTCAATGACCGCACCCG
CTTCCGGGCCTCTCTAAGACTCAAGCCTCGCTGCTCTGCTGAGGAGGGCCCCTCAGAGGAAGTG
GCCGAGGAGAAGAGCTACCAGTGTGAGCTTACGGTGGATGATGTCATGCCTGCTGTGAAGACGG
TCATCCGTTCTGTCAGGATTCTGAAGTTCCTGGTAGCCAAAAGGAAATTCAAGGAGACGCTGCG
GCCATATGATGTGAAGGATGTCATTGAGCAGTATTCAGCAGGACACCTGGACATGCTGGGACGA
ATCAAGAGCCTGCAAGCCCGGGTGGACCAAATTGTGGGTCGGGGCCCTGGGGACCGCAAGACTC
GGGAGAAGGGCGATAAGGGTCCTTCAGACACGGAGGCAGTGGATGAAATCAGCATGATGGGGCG
CGTAGTCAAGGTGGAAAAGCAGGTGCAGTCCATCGAACATAAGTTGGATCTGCTGCTGGGCTTC
TACTCGCGCTGCCTCCGCTCTGGCACCTCGGCCAGCCTGGGCACTGTGCAAGTGCCGCTCTTCG
ACCCCGACATCACCTCGGACTACCACAGCCCTGTAGACCACGAGGACATCTCTGTCTCCGCACA
GACGCTCAGCATCTCTCGCTCAGTCAGCACCAACATGGAC

b. KCNQ4 Polypeptides

[0169] Among other things, the present disclosure provides polypeptides encoded by a KCNQ4 gene or gene product or characteristic portion thereof. In some embodiments, a KCNQ4 gene is a mammalian KCNQ4 gene. In some embodiments, a KCNQ4 gene is a murine KCNQ4 gene. In some embodiments, a KCNQ4 gene is a primate KCNQ4 gene. In some embodiments, a KCNQ4 gene is a human KCNQ4 gene.

[0170] In some embodiments, a polypeptide comprises a Kv7.4 protein or characteristic portion thereof. In some embodiments, a Kv7.4 protein or characteristic portion thereof is a mammalian Kv7.4 protein or characteristic portion thereof, e.g., primate Kv7.4 protein or characteristic portion thereof. In some embodiments, a Kv7.4 protein or characteristic portion thereof is a human Kv7.4 protein or characteristic portion thereof.

[0171] In some embodiments, a polypeptide provided herein comprises post-translational modifications. In some embodiments, a Kv7.4 protein or characteristic portion thereof provided herein comprises post-translational modifications. In some embodiments, post-translational modifications can comprise but is not limited to glycosylation (e.g., N-linked glycosylation, 0-linked glycosylation), phosphorylation, acetylation, amidation, hydroxylation, methylation, ubiquitylation, sulfation, and/or a combination thereof.

[0172] By way of non-limiting example, a KCNQ4 polypeptide in accordance with the present disclosure may be or comprise one or more of the following:

KCNQ4 EXEMPLARY HUMAN KCNQ4 POLYPEPTIDE ISOFORM
ASEQUENCE
(SEQ ID NO: 11)
MAEAPPRRLGLGPPPGDAPRAELVALTAVQSEQGEAGGGGSPRRLGLLGSPLPPGAPLPGPGSG
SGSACGQRSSAAHKRYRRLQNWVYNVLERPRGWAFVYHVFIFLLVFSCLVLSVLSTIQEHQELA
NECLLILEFVMIVVFGLEYIVRVWSAGCCCRYRGWQGRFRFARKPFCVIDFIVFVASVAVIAAG
TQGNIFATSALRSMRFLQILRMVRMDRRGGTWKLLGSWYAHSKELITAWYIGFLVLIFASFLV
YLAEKDANSDFSSYADSLWWGTITLTTIGYGDKTPHTWLGRVLAAGFALLGISFFALPAGILGS
GFALKVQEQHRQKHFEKRRMPAANLIQAAWRLYSTDMSRAYLTATWYYYDSILPSFRELALLFE
HVQRARNGGLRPLEVRRAPVPDGAPSRYPPVATCHRPGSTSFCPGESSRMGIKDRIRMGSSQRR
TGPSKQHLAPPTMPTSPSSEQVGEATSPTKVQKSWSFNDRTRFRASLRLKPRTSAEDAPSEEVA
EEKSYQCELTVDDIMPAVKTVIRSIRILKFLVAKRKFKETLRPYDVKDVIEQYSAGHLDMLGRI
KSLQTRVDQIVGRGPGDRKAREKGDKGPSDAEWDEISMMGRWKVEKQVQSIEHKLDLLLGFY
SRCLRSGTSASLGAVQVPLFDPDITSDYHSPVDHEDISVSAQTLSISRSVSTNMD
EXEMPLARY HUMAN KCNQ4 POLYPEPTIDE ISOFORM B
SEQUENCE
(SEQ ID NO: 12)
MAEAPPRRLGLGPPPGDAPRAELVALTAVQSEQGEAGGGGSPRRLGLLGSPLPPGAPLPGPGSG
SGSACGQRSSAAHKRYRRLQNWVYNVLERPRGWAFVYHVFIFLLVFSCLVLSVLSTIQEHQELA
NECLLILEFVMIVVFGLEYIVRVWSAGCCCRYRGWQGRFRFARKPFCVIDFIVFVASVAVIAAG
TQGNIFATSALRSMRFLQILRMVRMDRRGGTWKLLGSVVYAHSKELITAWYIGFLVLIFASFLV
YLAEKDANSDFSSYADSLWWGTITLTTIGYGDKTPHTWLGRVLAAGFALLGISFFALPAGILGS
GFALKVQEQHRQKHFEKRRMPAANLIQAAWRLYSTDMSRAYLTATWYYYDSILPSFSSRMGIKD
RIRMGSSQRRTGPSKQHLAPPTMPTSPSSEQVGEATSPTKVQKSWSFNDRTRFRASLRLKPRTS
AEDAPSEEVAEEKSYQCELTVDDIMPAVKTVIRSIRILKFLVAKRKFKETLRPYDVKDVIEQYS
AGHLDMLGRIKSLQTRVDQIVGRGPGDRKAREKGDKGPSDAEVVDEISMMGRVVKVEKQVQSIE
HKLDLLLGFYSRCLRSGTSASLGAVQVPLFDPDITSDYHSPVDHEDISVSAQTLSISRSVSTNM
D
EXEMPLARY HUMAN KCNQ4 POLYPEPTIDE ISOFORM XI
SEQUENCE
(SEQ ID NO: 13)
MPAANLIQAAWRLYSTDMSRAYLTATWYYYDSILPSFRELALLFEHVQRARNGGLRPLEVRRAP
VPDGAPSRYPPVATCHRPGSTSFCPGESSRMGIKDRIRMGSSQRRTGPSKQHLAPPTMPTSPSS
EQVGEATSPTKVQKSWSFNDRTRFRASLRLKPRTSAEDAPSEEVAEEKSYQCELTVDDIMPAVK
TVIRSIRILKFLVAKRKFKETLRPYDVKDVIEQYSAGHLDMLGRIKSLQTRVDQIVGRGPGDRK
AREKGDKGPSDAEVVDEISMMGRVVKVEKQVQSIEHKLDLLLGFYSRCLRSGTSASLGAVQVPL
FDPDITSDYHSPVDHEDISVSAQTLSISRSVSTNMD
EXEMPLARY MOUSE KCNQ4 POLYPEPTIDE MEMBER 4 SEQUENCE
(SEQ ID NO: 92)
MAEAPPRRLGLGPPPGDAPRAELVALTAVQSEQGEAGGGGSPRRLGLLGSPLPPGAPLPGPGSG
SGSACGGQRSSAAQKRYRRLQNWVYNVLERPRGWAFVYHVFIFLLVFSCLVLSVLSTIQEHQEL
ANECLLILEFVMIVVFGLEYIIRVWSAGCCCRYRGWQGRFRFARKPFCVIDFIVFVASVAVIAA
GTQGNIFATSALRSMRFLQILRMVRMDRRGGTWKLLGSVVYAHSKELITAWYIGFLVLIFASFL
VYLAEKDANSDFSSYADSLWWGTITLTTIGYGDKTPHTWLGRVLAAGFALLGISFFALPAGILG
SGFALKVQEQHRQKHFEKRRMPAANLIQAAWRLYSTDTSRAYLTATWYYYDSILPSFRELALLF
EHIQRARNGGLRPLEVRRAPVPDGAPSRYPPVATCHRPGSASFCPGESSRMGIKDRIRISSSQK
RTGPSKQHLAPPPIPTSPSSEQVGEASSPSKVQKSWSFNDRTRFRASLRLKPRCSAEEGPSEEV
AEEKSYQCELTVDDVMPAVKTVIRSVRILKFLVAKRKFKETLRPYDVKDVIEQYSAGHLDMLGR
IKSLQARVDQIVGRGPGDRKTREKGDKGPSDTEAVDEISMMGRWKVEKQVQSIEHKLDLLLGF
YSRCLRSGTSASLGTVQVPLFDPDITSDYHSPVDHEDISVSAQTLSISRSVSTNMD

c. Constructs

[0173] Among other things, the present disclosure provides that some polynucleotides as described herein are polynucleotide constructs. Polynucleotide constructs according to the present disclosure include all those known in the art, including cosmids, plasmids (e.g., naked or contained in liposomes) and viral constructs (e.g., lentiviral, retroviral, adenoviral, and adeno-associated viral constructs) that incorporate a polynucleotide comprising a KCNQ4 gene or characteristic portion thereof. Those of skill in the art will be capable of selecting suitable constructs, as well as cells, for making any of the nucleic acids described herein. In some embodiments, a construct is a plasmid (i.e., a circular DNA molecule that can autonomously replicate inside a cell). In some embodiments, a construct can be a cosmid (e.g., pWE or sCos series).

[0174] Constructs provided herein can be of different sizes. In some embodiments, a construct is a plasmid and can include a total length of up to about 1 kb, up to about 2 kb, up to about 3 kb, up to about 4 kb, up to about 5 kb, up to about 6 kb, up to about 7 kb, up to about 8 kb, up to about 9 kb, up to about 10 kb, up to about 11 kb, up to about 12 kb, up to about 13 kb, up to about 14 kb, or up to about 15 kb. In some embodiments, a construct is a plasmid and can have a total length in a range of about 1 kb to about 2 kb, about 1 kb to about 3 kb, about 1 kb to about 4 kb, about 1 kb to about 5 kb, about 1 kb to about 6 kb, about 1 kb to about 7 kb, about 1 kb to about 8 kb, about 1 kb to about 9 kb, about 1 kb to about 10 kb, about 1 kb to about 11 kb, about 1 kb to about 12 kb, about 1 kb to about 13 kb, about 1 kb to about 14 kb, or about 1 kb to about 15 kb.

[0175] In some embodiments, a construct is a viral construct and can have a total number of nucleotides of up to 10 kb. In some embodiments, a viral construct can have a total number of nucleotides in the range of about 1 kb to about 2 kb, 1 kb to about 3 kb, about 1 kb to about 4 kb, about 1 kb to about 5 kb, about 1 kb to about 6 kb, about 1 kb to about 7 kb, about 1 kb to about 8 kb, about 1 kb to about 9 kb, about 1 kb to about 10 kb, about 2 kb to about 3 kb, about 2 kb to about 4 kb, about 2 kb to about 5 kb, about 2 kb to about 6 kb, about 2 kb to about 7 kb, about 2 kb to about 8 kb, about 2 kb to about 9 kb, about 2 kb to about 10 kb, about 3 kb to about 4 kb, about 3 kb to about 5 kb, about 3 kb to about 6 kb, about 3 kb to about 7 kb, about 3 kb to about 8 kb, about 3 kb to about 9 kb, about 3 kb to about 10 kb, about 4 kb to about 5 kb, about 4 kb to about 6 kb, about 4 kb to about 7 kb, about 4 kb to about 8 kb, about 4 kb to about 9 kb, about 4 kb to about 10 kb, about 5 kb to about 6 kb, about 5 kb to about 7 kb, about 5 kb to about 8 kb, about 5 kb to about 9 kb, about 5 kb to about 10 kb, about 6 kb to about 7 kb, about 6 kb to about 8 kb, about 6 kb to about 9 kb, about 6 kb to about 10 kb, about 7 kb to about 8 kb, about 7 kb to about 9 kb, about 7 kb to about 10 kb, about 8 kb to about 9 kb, about 8 kb to about 10 kb, or about 9 kb to about 10 kb.

[0176] In some embodiments, a construct is an adeno-associated virus (AAV) construct and can have a total number of nucleotides of up to 5 kb in a single construct. In some embodiments, an AAV construct can have a total number of nucleotides in the range of about 1 kb to about 2 kb, 1 kb to about 3 kb, about 1 kb to about 4 kb, about 1 kb to about 5 kb, about 2 kb to about 3 kb, about 2 kb to about 4 kb, about 2 kb to about 5 kb, about 3 kb to about 4 kb, about 3 kb to about 5 kb, about 4 kb to about 5 kb.

[0177] In some embodiments, a construct is a lentivirus construct and can have a total number of nucleotides of up to 8 kb. In some examples, a lentivirus construct can have a total number of nucleotides of about 1 kb to about 2 kb, about 1 kb to about 3 kb, about 1 kb to about 4 kb, about 1 kb to about 5 kb, about 1 kb to about 6 kb, about 1 kb to about 7 kb, about 1 kb to about 8 kb, about 2 kb to about 3 kb, about 2 kb to about 4 kb, about 2 kb to about 5 kb, about 2 kb to about 6 kb, about 2 kb to about 7 kb, about 2 kb to about 8 kb, about 3 kb to about 4 kb, about 3 kb to about 5 kb, about 3 kb to about 6 kb, about 3 kb to about 7 kb, about 3 kb to about 8 kb, about 4 kb to about 5 kb, about 4 kb to about 6 kb, about 4 kb to about 7 kb, about 4 kb to about 8 kb, about 5 kb to about 6 kb, about 5 kb to about 7 kb, about 5 kb to about 8 kb, about 6 kb to about 8 kb, about 6 kb to about 7 kb, or about 7 kb to about 8 kb

[0178] In some embodiments, a construct is an adenovirus construct and can have a total number of nucleotides of up to 8 kb. In some embodiments, an adenovirus construct can have a total number of nucleotides in the range of about 1 kb to about 2 kb, about 1 kb to about 3 kb, about 1 kb to about 4 kb, about 1 kb to about 5 kb, about 1 kb to about 6 kb, about 1 kb to about 7 kb, about 1 kb to about 8 kb, about 2 kb to about 3 kb, about 2 kb to about 4 kb, about 2 kb to about 5 kb, about 2 kb to about 6 kb, about 2 kb to about 7 kb, about 2 kb to about 8 kb, about 3 kb to about 4 kb, about 3 kb to about 5 kb, about 3 kb to about 6 kb, about 3 kb to about 7 kb, about 3 kb to about 8 kb, about 4 kb to about 5 kb, about 4 kb to about 6 kb, about 4 kb to about 7 kb, about 4 kb to about 8 kb, about 5 kb to about 6 kb, about 5 kb to about 7 kb, about 5 kb to about 8 kb, about 6 kb to about 7 kb, about 6 kb to about 8 kb, or about 7 kb to about 8 kb.

[0179] Any of the constructs described herein can further include a control sequence, e.g., a control sequence selected from the group of a transcription initiation sequence, a transcription termination sequence, a promoter sequence, an enhancer sequence, an RNA splicing sequence, a polyadenylation (polyA) sequence, a Kozak consensus sequence, and/or additional untranslated regions which may house pre- or post-transcriptional regulatory and/or control elements. In some embodiments, a promoter can be a native promoter, a constitutive promoter, an inducible promoter, and/or a tissue-specific promoter. Non-limiting examples of control sequences are described herein. The foregoing methods for producing recombinant constructs are not meant to be limiting, and other suitable methods will be apparent to the skilled artisan.

d. Viral Constructs

[0180] The present disclosure provides technologies (e.g., compositions, methods, etc.) that are or comprise viral constructs. In some embodiments, a viral construct is an adenovirus. In some embodiments, a viral construct is an adeno-associated virus (AAV). In some embodiments, a viral construct may also be based on an alphavirus. Alphaviruses include Sindbis (and VEEV) virus, Aura virus, Babanki virus, Barmah Forest virus, Bebaru virus, Cabassou virus, Chikungunya virus, Eastern equine encephalitis virus, Everglades virus, Fort Morgan virus, Getah virus, Highlands J virus, Kyzylagach virus, Mayaro virus, Me Tri virus, Middelburg virus, Mosso das Pedras virus, Mucambo virus, Ndumu virus, O′nyong-nyong virus, Pixuna virus, Rio Negro virus, Ross River virus, Salmon pancreas disease virus, Semliki Forest virus, Southern elephant seal virus, Tonate virus, Trocara virus, Una virus, Venezuelan equine encephalitis virus, Western equine encephalitis virus, and Whataroa virus. Generally, genomes of such viruses encode nonstructural (e.g., replicon) and structural proteins (e.g., capsid and envelope) that can be translated in cytoplasm of a host cell. Ross River virus, Sindbis virus, Semliki Forest virus (SFV), and Venezuelan equine encephalitis virus (VEEV) have all been used to develop viral transfer constructs for transgene delivery. Pseudotyped viruses may be formed by combining alphaviral envelope glycoproteins and retroviral capsids. Examples of alphaviral constructs can be found in U.S. Publication Nos. 20150050243, 20090305344, and 20060177819; constructs and methods of their making are incorporated herein by reference in their entireties.

i. AAV constructs

[0181] Recombinant AAV constructs (“rAAVs”; see, e.g., Asokan et al., Mol. Ther. 20: 699-7080, 2012, which is herein incorporated by reference in its entirety) of the disclosure are typically comprised of (i) a transgene or a portion thereof and a regulatory sequence, and (ii) 5′ and 3′ AAV inverted terminal repeats (ITRs). It is this recombinant AAV construct which is packaged into a capsid protein and delivered to a selected target cell. In some embodiments, the transgene is a nucleic acid sequence (e.g., inhibitory nucleic acid sequence), heterologous to the construct sequences, which encodes a polypeptide, protein, functional RNA molecule (e.g., miRNA, miRNA inhibitor) or other gene product, of interest. A nucleic acid coding sequence is operatively linked to regulatory components in a manner which permits transgene transcription, translation, and/or expression in a cell of a target tissue. In some embodiments, a recombinant AAV construct is packaged into a capsid to form an rAAV particle and delivered to a selected target cell (e.g., an outer hair cell).

[0182] In some embodiments, and rAAV construct also comprises conventional control elements that are operably linked to a transgene in a manner which permits its transcription, translation and/or expression in a cell transfected with a plasmid construct or infected with a virus produced by the disclosure.

[0183] AAV constructs as described in the present disclosure may include one or more additional elements as described herein (e.g., regulatory elements e.g., one or more of a promoter, a polyA sequence, and an IRES).

[0184] Methods for obtaining viral constructs are known in the art. For example, to produce AAV constructs, methods typically involve culturing a host cell which comprises a nucleic acid sequence encoding an AAV capsid protein or fragment thereof; a functional rep gene; a recombinant AAV construct comprising an AAV inverted terminal repeats (ITRs) and a transgene; and/or sufficient helper functions to permit packaging of the recombinant AAV construct into AAV capsid proteins.

[0185] In some embodiments, components to be cultured in a host cell to package an AAV construct in an AAV capsid may be provided to the host cell in trans. Alternatively, one or more components (e.g., recombinant AAV construct, rep sequences, cap sequences, and/or helper functions) may be provided by a stable host cell that has been engineered to contain one or more such components using methods known to those of skill in the art. In some embodiments, such a stable host cell contains such component(s) under control of an inducible promoter. In some embodiments, such component(s) may be under control of a constitutive promoter. In some embodiments, a selected stable host cell may contain selected component(s) under control of a constitutive promoter and other selected component(s) under control of one or more inducible promoters. For example, a stable host cell may be generated that is derived from HEK293 cells (which contain E1 helper functions under the control of a constitutive promoter), but that contain rep and/or cap proteins under control of inducible promoters. Other stable host cells may be generated by one of skill in the art using routine methods.

[0186] Recombinant AAV construct, rep sequences, cap sequences, and helper functions required for producing an AAV of the disclosure may be delivered to a packaging host cell using any appropriate genetic element (e.g., construct). A selected genetic element may be delivered by any suitable method known in the art, e.g., to those with skill in nucleic acid manipulation and include genetic engineering, recombinant engineering, and synthetic techniques (see, e.g., Sambrook et al., Molecular Cloning: A Laboratory Manual, Cold Spring Harbor Press, Cold Spring Harbor, N.Y., which is incorporated in its entirety herein by reference). Similarly, methods of generating AAV virions are well known and any suitable method can be used with the present disclosure (see, e.g., K. Fisher et al., J. Virol., 70:520-532 (1993) and U.S. Pat. No. 5,478,745, each of which is incorporated in its entirety herein by reference).

[0187] In some embodiments, recombinant AAVs may be produced using a triple transfection method (e.g., as described in U.S. Pat. No. 6,001,650, which is incorporated in its entirety herein by reference). In some embodiments, recombinant AAVs are produced by transfecting a host cell with a recombinant AAV construct (comprising a transgene) to be packaged into AAV particles, an AAV helper function construct, and an accessory function construct. An AAV helper function construct encodes “AAV helper function” sequences (i.e., rep and cap), which function in trans for productive AAV replication and encapsidation. In some embodiments, an AAV helper function construct supports efficient AAV construct production without generating any detectable wild-type AAV virions (i.e., AAV virions containing functional rep and cap genes). Non-limiting examples of constructs suitable for use with the present disclosure include pHLP19 (see, e.g., U.S. Pat. No. 6,001,650, which is incorporated in its entirety herein by reference) and pRep6cap6 construct (see, e.g., U.S. Pat. No. 6,156,303, which is incorporated in its entirety herein by reference). An accessory function construct encodes nucleotide sequences for non-AAV derived viral and/or cellular functions upon which AAV is dependent for replication (i.e., “accessory functions”). Accessory functions may include those functions required for AAV replication, including, without limitation, those moieties involved in activation of AAV gene transcription, stage specific AAV mRNA splicing, AAV DNA replication, synthesis of cap expression products, and AAV capsid assembly. Viral-based accessory functions can be derived from any known helper viruses such as adenovirus, herpesvirus (other than herpes simplex virus type-1), and vaccinia virus.

[0188] Additional methods for generating and isolating AAV viral constructs suitable for delivery to a subject are described in, e.g., U.S. Pat. Nos. 7,790,449; 7,282,199; WO 2003/042397; WO 2005/033321, WO 2006/110689; and U.S. Pat. No. 7,588,772, each of which is incorporated in its entirety herein by reference. In one system, a producer cell line is transiently transfected with a construct that encodes a transgene flanked by ITRs and a construct(s) that encodes rep and cap. In another system, a packaging cell line that stably supplies rep and cap is transiently transfected with a construct encoding a transgene flanked by ITRs. In each of these systems, in some embodiments, AAV virions are produced in response to infection with helper adenovirus or herpesvirus, and AAVs are separated from contaminating virus. In some embodiments, systems do not require infection with helper virus to recover the AAV. As will be understood to those of skill in the art, in some embodiments, a helper function is or comprises at least one of e.g., adenovirus E1, E2a, VA, and E4 or herpesvirus UL5, UL8, UL52, and UL29, and herpesvirus polymerase. In some such embodiments, a helper function is supplied, in trans, by or to a given system. In some such embodiments, helper functions can be supplied by transient transfection of cells with constructs that encode helper functions. In some embodiments, cells can be engineered to stably contain genes encoding at least one helper function. In some such embodiments, where cells are stably engineered to contain genes encoding helper function(s) helper function expression can be controlled at a transcriptional or posttranscriptional level.

AAV serotypes

[0189] As described herein, in some embodiments, a viral construct of the present disclosure is an adeno-associated virus (AAV) construct. AAV systems are generally well known in the art (see, e.g., Kelleher and Vos, Biotechniques, 17(6):1110-17 (1994); Cotten et al., P.N.A.S. U.S.A., 89(13):6094-98 (1992); Curiel, Nat Immun, 13(2-3):141-64 (1994); Muzyczka, Curr Top Microbiol Immunol, 158:97-129 (1992); and Asokan A, et al., Mol. Ther., 20(4):699-708 (2012), each of which is incorporated in its entirety herein by reference). Methods for generating and using AAV constructs are described, for example, in U.S. Pat. Nos. 5,139,941 and 4,797,368, each of which is incorporated in its entirety herein by reference. Several AAV serotypes have been characterized, including AAV1, AAV2, AAV3 (e.g., AAV3B), AAV4, AAV5, AAV6, AAV7, AAV8, AAV9, AAV10, and AAV11, as well as variants thereof. In some embodiments, an AAV construct is an AAV2/6, AAV2/8 or AAV2/9 construct (e.g., AAV6, AAV8 or AAV9 serotype having AAV2 ITR). Other AAV constructs are described in, e.g., Sharma et al., Brain Res Bull. 2010 Feb. 15; 81(2-3): 273, which is incorporated in its entirety herein by reference. Generally, any AAV serotype may be used to deliver a transgene described herein. However, serotypes are known to have different tropisms, e.g., they preferentially infect different tissues. In some embodiments, an AAV construct is a self-complementary AAV construct.

iii. Capsids

[0190] In some embodiments, one or more recombinant AAV constructs of the present disclosure is packaged into a capsid of AAV2, 3, 4, 5, 6, 7, 8, 9, 10, rh8, rh10, rh39, rh43, AAV2.7m8, AAV8BP2, or Anc80 serotype or one or more hybrids thereof. In some embodiments, a capsid is from an ancestral serotype. For example, in some embodiments, a capsid is an Anc80 capsid (e.g., an Anc80L65 capsid). In some embodiments, a capsid comprises a polypeptide represented by SEQ ID NO: 14. In some embodiments, a capsid comprises a polypeptide with at least 85%, 90%, 95%, 98% or 99% sequence identity to a polypeptide of SEQ ID NO: 14.

[0191] Any combination of ITRs and capsids may be used in recombinant AAV constructs of the present disclosure, for example, wild-type or variant AAV2 ITRs and Anc80 capsid, wild-type or variant AAV2 ITRs and AAV6 capsid, etc. In some embodiments of the present disclosure, an rAAV particle is wholly comprised of AAV2 components (i.e., capsid and ITRs are AAV2 serotype). In some embodiments of the present disclosure an rAAV particle is an rAAV2/Anc80 particle which comprises an Anc80 capsid (e.g., comprising a polypeptide of SEQ ID NO: 14) that encapsidates a nucleic acid construct with wild-type AAV2 ITRs (e.g., any of SEQ ID NOs: 15, 16, 17, 18, 19, 20 and/or 21) flanking a portion of a construct comprising all or a characteristic portion of a KCNQ4 encoding sequence (e.g., SEQ ID NOs:1-10). In some embodiments, an ITR is at least 85%, 90%, 95%, 98% or 99% identical to an ITR of SEQ ID NOs: 15, 16, 17, 18, 19, 20, or 21.

Anc80L65 Capsid
(SEQ ID NO: 14)
MAADGYLPDWLEDNLSEGIREWWDLKPGAPKPKANQQKQDDGRGLVLPGY
KYLGPFNGLDKGEPVNAADAAALEHDKAYDQQLKAGDNPYLRYNHADAEF
QERLQEDTSFGGNLGRAVFQAKKRVLEPLGLVEEGAKTAPGKKRPVEQSP
QEPDSSSGIGKKGQQPARKRLNFGQTGDSESVPDPQPLGEPPAAPSGVGS
NTMAAGGGAPMADNNEGADGVGNASGNWHCDSTWLGDRVITTSTRTWALP
TYNNHLYKQISSQSGGSTNDNTYFGYSTPWGYFDFNRFHCHFSPRDWQRL
INNNWGFRPKKLNFKLFNIQVKEVTTNDGTTTIANNLTSTVQVFTDSEYQ
LPYVLGSAHQGCLPPFPADVFMIPQYGYLTLNNGSQAVGRSSFYCLEYFP
SQMLRTGNNFQFSYTFEDVPFHSSYAHSQSLDRLMNPLIDQYLYYLSRTQ
TTSGTAGNRTLQFSQAGPSSMANQAKNWLPGPCYRQQRVSKTTNQNNNSN
FAWTGATKYHLNGRDSLVNPGPAMATHKDDEDKFFPMSGVLIFGKQGAGN
SNVDLDNVMITNEEEIKTTNPVATEEYGTVATNLQSANTAPATGTVNSQG
ALPGMVWQDRDVYLQGPIWAKIPHTDGHEHPSPLMGGFGLKHPPPQILIK
NTPVPANPPTTFSPAKFASFITQYSTGQVSVEIEWELQKENSKRWNPEIQ
YTSNYNKSTNVDFAVDTNGVYSEPRPIGTRYLTRNL

iv. Inverted Terminal Repeat Sequences (ITRs)

[0192] AAV sequences of a construct typically comprise the cis-acting 5′ and 3′ inverted terminal repeat sequences (See, e.g., B. J. Carter, in “Handbook of Parvoviruses,” ed., P. Tijsser, CRC Press, pp. 155 168 (1990), which is incorporated in its entirety herein by reference). In some embodiments, ITR sequences are about 145 nt in length. For example, wild type AAV2 ITRs are generally about 145 nt in length. Preferably, substantially the entire sequences encoding ITRs are used in a given molecule, although some degree of minor modification of these sequences is permissible. Ability to modify ITR sequences is within the skill of the art. (See, e.g., texts such as Sambrook et al. “Molecular Cloning. A Laboratory Manual,” 2d ed., Cold Spring Harbor Laboratory, New York (1989); and K. Fisher et al., J Virol., 70:520 532 (1996), each of which is incorporated in its entirety herein by reference). An example of such a molecule employed in the present disclosure is a “cis-acting” construct comprising a sequence encoding a gene product (e.g., a KCNQ4 gene product) or inhibitory nucleic acid thereof (e.g., an miRNA), in which such a sequence and its associated regulatory elements are flanked by 5′ or “left” and 3′ or “right” AAV ITR sequences. 5′ and left designations refer to a position of an ITR sequence relative to an entire construct, read left to right, in a sense direction. For example, in some embodiments, a 5′ or left ITR is an ITR that is closest to a promoter (as opposed to a polyadenylation sequence) for a given construct, when a construct is depicted in a sense orientation, linearly. 3′ and right designations refer to a position of an ITR sequence relative to an entire construct, read left to right, in a sense direction. For example, in some embodiments, a 3′ or right ITR is an ITR that is closest to a polyadenylation sequence (as opposed to a promoter sequence) for a given construct, when a construct is depicted in a sense orientation, linearly. ITRs as provided herein are depicted in 5′ to 3′ order in accordance with a sense strand. Accordingly, one of skill in the art will appreciate that a 5′ or “left” orientation ITR can also be depicted as a 3′ or “right” ITR when converting from sense to antisense direction. Further, it is well within the ability of one of skill in the art to transform a given sense ITR sequence (e.g., a 5′/left AAV ITR) into an antisense sequence (e.g., 3′/right ITR sequence). Accordingly, based upon known AAV ITRs one of skill in the art would understand, in looking at sequences disclosed herein, whether an ITR was in a sense or antisense orientation and whether it would go on a “left” or “right” side of a construct, whether or not it is explicitly labeled as such. One of ordinary skill in the art would understand how to modify a given ITR sequence for use as either a 5′/left or 3′/right ITR, or an antisense version thereof.

[0193] AAV ITR sequences may be obtained from any known AAV, including presently identified mammalian AAV types. In some embodiments, an ITR is or comprises 145 nucleotides. In some embodiments an ITR is a wild-type AAV2 ITR, e.g., the 5′ ITR of SEQ ID NO: 15 and the 3′ ITR of SEQ ID NO: 16. In some embodiments an ITR is derived from a wild-type AAV2 ITR and includes one or more modifications, e.g., truncations, deletions, substitutions or insertions as is known in the art. In some embodiments, an ITR comprises fewer than 145 nucleotides (e.g., SEQ ID NO:s 19 or 20), e.g., 119, 127, 130, 134 or 141 nucleotides (see, e.g., SEQ ID Nos: 17, 18, 19, and 20. For example, in some embodiments, an ITR comprises 110, 111, 112, 113, 114, 115, 116, 117, 118, 119, 120, 121, 122, 123,124, 125, 126, 127, 128, 129, 130, 131, 132, 133, 134, 135, 136, 137, 138, 139, 140, 141, 142, 143 144, or 145 nucleotides.

[0194] A non-limiting example of a 5′/left AAV ITR sequence is SEQ ID NO: 17. A non-limiting example of a 3′/right AAV ITR sequence is SEQ ID NO: 18. In some embodiments, constructs and/or constructs of the present disclosure comprise a 5′/left AAV ITR and/or a 3′/right AAV ITR. In some embodiments, a 5′/left AAV ITR sequence is SEQ ID NO: 16. In some embodiments, a 3′/right AAV ITR sequence is SEQ ID NO: 16. In some embodiments, a 5′/left AAV ITR sequence is SEQ ID NO: 15 and a 3′/right AAV ITR sequence is SEQ ID NO: 16. In some embodiments, an ITR is at least 85%, 90%, 95%, 98% or 99% identical to the ITR represented by SEQ ID NOs: 15, 16, 17, 18, or 19. In some embodiments, 5′/left and a 3′/right AAV ITRs (e.g., SEQ ID NOs: 15 and 16) flank a portion of a transgene and/or construct comprising all or a portion of a KCNQ4 gene product (e.g., SEQ ID NOs: 1-10).

[0195] In some embodiments, an ITR sequence is at least 85%, 90%, 95%, 98% or 99% identical to any ITR sequence disclosed herein. By way of non-limiting example, ITR sequences may be or comprise the following:

5′/Left AAV ITR
(SEQ ID NO: 15)
TTGGCCACTCCCTCTCTGCGCGCTCGCTCGCTCACTGAGGCCGCCCGGGCAAAGCCCGGGCGTC
GGGCGACCTTTGGTCGCCCGGCCTCAGTGAGCGAGCGAGCGCGCAGAGAGGGAGTGGCCAACTC
CATCACTAGGGGTTCCT
3′/Right AAV ITR
(SEQ ID NO: 16)
AGGAACCCCTAGTGATGGAGTTGGCCACTCCCTCTCTGCGCGCTCGCTCGCTCACTGAGGCCGG
GCGACCAAAGGTCGCCCGACGCCCGGGCTTTGCCCGGGCGGCCTCAGTGAGCGAGCGAGCGCGC
AGAGAGGGAGTGGCCAA
5′/Left AAV ITR
(SEQ ID NO: 17)
CCTGCAGGCAGCTGCGCGCTCGCTCGCTCACTGAGGCCGCCCGGGCGTCGGGCGACCTTTGGTC
GCCCGGCCTCAGTGAGCGAGCGAGCGCGCAGAGAGGGAGTGGCCAACTCCATCACTAGGGGTT
3′/Right AAV ITR
(SEQ ID NO: 18)
AGGAACCCCTAGTGATGGAGTTGGCCACTCCCTCTCTGCGCGCTCGCTCGCTCACTGAGGCCGG
GCGACCAAAGGTCGCCCGACGCCCGGGCTTTGCCCGGGCGGCCTCAGTGAGCGAGCGAGCGCGC
AGCTGCCTGCAGG
AAV ITR
(SEQ ID NO: 19)
CTGCGCGCTCGCTCGCTCACTGAGGCCGCCCGGGCGTCGGGCGACCTTTGGTCGCCCGGCCTCA
GTGAGCGAGCGAGCGCGCAGAGAGGGAGTGGCCAACTCCATCACTAGGGGTTCCT
AAV ITR
(SEQ ID NO: 20)
AGGAACCCCTAGTGATGGAGTTGGCCACTCCCTCTCTGCGCGCTCGCTCGCTCACTGAGGCCGG
GCGACCAAAGGTCGCCCGACGCCCGGGCTTTGCCCGGGCGGCCTCAGTGAGCGAGCGAGCGCGC
AG
AAV ITR
(SEQ ID NO: 21)
TTGGCCACTCCCTCTCTGCGCGCTCGCTCGCTCACTGAGGCCGCCCGGGCAAAGCCCGGGCGTC
GGGCGACCTTTGGTCGCCCGGCCTCAGTGAGCGAGCGAGCGCGCAGAGAGGGAGTGGCCAACTC
CATCACTAGGGGTTCCT

v. Promoters

[0196] Non-limiting examples of promoters are described herein. Additional examples of promoters are known in the art.

[0197] In some embodiments, a construct (e.g., an rAAV construct) comprises a promoter. The term “promoter” refers to a DNA sequence recognized by enzymes/proteins that can promote and/or initiate transcription of an operably linked gene (e.g., an KCNQ4 gene or inhibitory nucleic acid thereof). In some embodiments, a construct encoding a KCNQ4 gene product (e.g., a human Kv7.4 protein, etc.) or inhibitory nucleic acid thereof (e.g., an miRNA, etc.) can include a promoter and/or an enhancer. For example, a promoter typically refers to, e.g., a nucleotide sequence to which an RNA polymerase and/or any associated factor binds and from which it can initiate transcription. Thus, in some embodiments, a construct (e.g., an rAAV construct) comprises a promoter operably linked to one of the non-limiting example promoters described herein.

[0198] In some embodiments, a promoter is an inducible promoter, a constitutive promoter, a mammalian cell promoter, a viral promoter, a chimeric promoter, an engineered promoter, a tissue-specific promoter, or any other type of promoter known in the art. In some embodiments, a promoter is a RNA polymerase II promoter, such as a mammalian RNA polymerase II promoter. In some embodiments, a promoter is a RNA polymerase III promoter, including, but not limited to, a HI promoter, a human U6 promoter, a mouse U6 promoter, or a swine U6 promoter. A promoter will generally be one that is able to promote transcription in an inner ear cell. In some embodiments, a promoter is a cochlea-specific promoter or a cochlea-oriented promoter. In some embodiments, a promoter is a hair cell specific promoter, or a supporting cell specific promoter.

[0199] A variety of promoters are known in the art, which can be used herein. Non-limiting examples of promoters that can be used herein include: human EF1α, human cytomegalovirus (CMV) (U.S. Pat. No. 5,168,062, which is incorporated in its entirety herein by reference), human ubiquitin C (UBC), mouse phosphoglycerate kinase 1, polyoma adenovirus, simian virus 40 (SV40), β-globin, β-actin, α-fetoprotein, γ-globin, β-interferon, γ-glutamyl transferase, mouse mammary tumor virus (MMTV), Rous sarcoma virus, rat insulin, glyceraldehyde-3-phosphate dehydrogenase, metallothionein II (MT II), amylase, cathepsin, MI muscarinic receptor, retroviral LTR (e.g., human T-cell leukemia virus HTLV), AAV ITR, interleukin-2, collagenase, platelet-derived growth factor, adenovirus 5 E2, stromelysin, murine MX gene, glucose regulated proteins (GRP78 and GRP94), α-2-macroglobulin, vimentin, MHC class I gene H-2κ b, HSP70, proliferin, tumor necrosis factor, thyroid stimulating hormone a gene, immunoglobulin light chain, T-cell receptor, HLA DQa and DQ, interleukin-2 receptor, MEW class II, MEW class II HLA-DRa, muscle creatine kinase, prealbumin (transthyretin), elastase I, albumin gene, c-fos, c-HA-ras, neural cell adhesion molecule (NCAM), H2B (TH2B) histone, rat growth hormone, human serum amyloid (SAA), troponin I (TN I), duchenne muscular dystrophy, human immunodeficiency virus, and Gibbon Ape Leukemia Virus (GALV) promoters. Additional examples of promoters are known in the art. See, e.g., Lodish, Molecular Cell Biology, Freeman and Company, New York 2007, each of which is incorporated in its entirety herein by reference. In some embodiments, a promoter is the CMV immediate early promoter.

[0200] In some embodiments, a promoter is an inducible promoter, a mammalian cell promoter, a viral promoter, a chimeric promoter, an engineered promoter, a constitutive promoter, a tissue-specific promoter, or any other type of promoter known in the art.

[0201] In some embodiments, a promoter is a RNA polymerase II promoter, such as a mammalian RNA polymerase II promoter.

[0202] In some embodiments, a promoter is a RNA polymerase III promoter (e.g., an H1 promoter, a U6 promoter (e.g., a human U6 promoter, a mouse U6 promoter, a swine U6 promoter, etc.).

[0203] In some embodiments, a promoter of the present disclosure will generally be one that is able to function (i.e., transcribe), in cochlear cells such as hair cells, e.g., IHCs, e.g., OHCs.

[0204] In some embodiments, a promoter is a cochlea-specific promoter or a cochlea-oriented promoter.

[0205] A variety of promoters is known in the art, any of which can be used herein. Non-limiting examples of promoters that can be used herein include: human elongation factor 1α-subunit (EF1a) (Liu et al. (2007) Exp. Mol. Med. 39(2): 170-175; Accession No. J04617.1; Gill et al., Gene Ther. 8(20):1539-1546, 2001; Xu et al., Human Gene Ther. 12(5):563-573, 2001; Xu et al., Gene Ther. 8:1323-1332; Ikeda et al., Gene Ther. 9:932-938, 2002; Gilham et al., J. Gene Med. 12(2):129-136, 2010, each of which is incorporated in its entirety herein by reference), cytomegalovirus (Xu et al., Human Gene Ther. 12(5):563-573, 2001; Xu et al., Gene Ther. 8:1323-1332; Gray et al., Human Gene Ther. 22:1143-1153, 2011, each of which is incorporated in its entirety herein by reference), human immediate-early cytomegalovirus (CMV) (U.S. Pat. No. 5,168,062, Liu et al. (2007) Exp. Mol. Med. 39(2): 170-175; Accession No. X17403.1 or KY490085.1, each of which is incorporated in its entirety herein by reference), human ubiquitin C (UBC) (Gill et al., Gene Ther. 8(20):1539-1546, 2001; Qin et al., PLoS One 5(5):e10611, 2010, each of which is incorporated in its entirety herein by reference), mouse phosphoglycerate kinase 1, polyoma adenovirus, simian virus 40 (SV40), β-globin, β-actin, α-fetoprotein, γ-globin, β-interferon, γ-glutamyl transferase, mouse mammary tumor virus (MMTV), Rous sarcoma virus, rat insulin, glyceraldehyde-3-phosphate dehydrogenase, metallothionein II (MT II), amylase, cathepsin, MI muscarinic receptor, retroviral LTR (e.g., human T-cell leukemia virus HTLV, each of which is incorporated in its entirety herein by reference), AAV ITR, interleukin-2, collagenase, platelet-derived growth factor, adenovirus 5 E2, stromelysin, murine MX gene, glucose regulated proteins (GRP78 and GRP94), α-2-macroglobulin, vimentin, MHC class I gene H-2-κ b, HSP70, proliferin, tumor necrosis factor, thyroid stimulating hormone a gene, immunoglobulin light chain, T-cell receptor, HLA DQα and DQβ, interleukin-2 receptor, MHC class II, MHC class II HLA-DRα, muscle creatine kinase, prealbumin (transthyretin), elastase I, albumin gene, c-fos, c-HA-ras, neural cell adhesion molecule (NCAM), H2B (TH2B) histone, rat growth hormone, human serum amyloid (SAA), troponin I (TN I), duchenne muscular dystrophy, human immunodeficiency virus, Gibbon Ape Leukemia Virus (GALV) promoters, promoter of HNRPA2B1-CBX1 (UCOE) (Powell and Gray (2015) Discov. Med. 19(102): 49-57; Antoniou et al., Human Gene Ther. 24(4):363-374, 2013), β-glucuronidase (GUSB) (Husain et al., Gene Ther. 16:927-932, 2009), chicken β-actin (CBA) (Liu et al. (2007) Exp. Mol. Med. 39(2): 170-175; Stone et al. (2005) Mol. Ther. 11(6): 843-848; Klein et al., Exp. Neurol. 176(1):66-74, 2002; Ohlfest et al., Blood 105:2691-2698, 2005; Gray et al., Human Gene Ther. 22:1143-1153, 2011, each of which is incorporated in its entirety herein by reference), a human β-actin promoter (HBA) (Accession No. Y00474.1), murine myosin VIIA (musMyo7) (Boeda et al. (2001) Hum. Mol. Genet. 10(15): 1581-1589; Accession No. AF384559.1, each of which is incorporated in its entirety herein by reference), human myosin VIIA (hsMyo7) (Boeda et al. (2001) Hum. Mol. Genet. 10(15): 1581-1589; Accession No. NG_009086.1, each of which is incorporated in its entirety herein by reference), murine poly(ADP-ribose) polymerase 2 (musPARP2) (Ame et al. (2001) J. Biol. Chem. 276(14): 11092-11099; Accession No. AF191547.1, each of which is incorporated in its entirety herein by reference), human poly(ADP-ribose) polymerase 2 (hsPARP2) (Ame et al. (2001) J. Biol. Chem. 276(14): 11092-11099; Accession No. X16612.1 or AF479321.1, each of which is incorporated in its entirety herein by reference), acetylcholine receptor epsilon-subunit (AChε) (Duclert et al. (1993) PNAS 90(7): 3043-3047; Accession No. S58221.1 or CR933736.12, each of which is incorporated in its entirety herein by reference), Rous sarcoma virus (RSV) (Liu et al. (2007) Exp. Mol. Med. 39(2): 170-175; Accession No. M77786.1, each of which is incorporated in its entirety herein by reference), (GFAP) (Liu et al. (2007) Exp. Mol. Med. 39(2): 170-175; Stone et al. (2005) Mol. Ther. 11(6): 843-848; Accession No. NG_008401.1 or M67446.1, each of which is incorporated in its entirety herein by reference), hAAT (Van Linthout et al., Human Gene Ther. 13(7):829-840, 2002; Cunningham et al., Mol. Ther. 16(6):1081-1088, 2008, each of which is incorporated in its entirety herein by reference), and a CBA hybrid (CBh) (Gray et al. (2011) Human Gene Therapy 22: 1143-1153; Accession No. KF926476.1 or KC152483.1, each of which is incorporated in its entirety herein by reference). Additional examples of promoters are known in the art. See, e.g., Lodish, Molecular Cell Biology, Freeman and Company, New York 2007.

[0206] In some embodiments, a promoter is a CMV immediate early promoter.

[0207] In some embodiments, a promoter is a CAG promoter or a CAG/CBA promoter.

[0208] In some embodiments, a promoter is an smCBA promoter.

[0209] In some embodiments, a construct or construct of the present disclosure comprises a CAG promoter. In some embodiments, a CAG promoter comprises, in order from 5′ to 3′, nucleotide sequences of SEQ ID NOs: 22, 23, and 24. In some such embodiments, a CAG promoter comprises a CMV early enhancer element (e.g., SEQ ID NO: 22 or SEQ ID NO: 298 or SEQ ID NO: 299), a chicken beta actin (CBA) gene sequence (e.g., SEQ ID NO: 23), and a chimeric intron/3′ splice sequence from a rabbit beta globin gene (e.g., SEQ ID NO: 24). In some embodiments, a promoter is at least 85%, 90%, 95%, 98% or 99% identical to CAG promoter represented by SEQ ID NOs: 22, 23, 24, 300, or 301.

[0210] The term “constitutive” promoter refers to a nucleotide sequence that, when operably linked with a nucleic acid encoding a protein (e.g., a KCNQ4 protein) or an inhibitory nucleic acid (e.g., as described herein), causes RNA to be transcribed from the nucleic acid in a cell under most or all physiological conditions.

[0211] Examples of constitutive promoters include, without limitation, a retroviral Rous sarcoma virus (RSV) LTR promoter, a cytomegalovirus (CMV) promoter (see, e.g., Boshart et al. Cell 41:521-530, 1985, which is incorporated in its entirety herein by reference), an SV40 promoter, a dihydrofolate reductase promoter, a beta-actin promoter, a phosphoglycerol kinase (PGK) promoter, and an EF1-alpha promoter (Invitrogen).

[0212] In some embodiments, inducible promoters allow regulation of gene expression and can be regulated by exogenously supplied compounds, environmental factors such as temperature, or presence of a specific physiological state, e.g., acute phase, a particular functional or biological state of a cell, e.g., a particular differentiation state of a cell, or in replicating cells only. Inducible promoters and inducible systems are available from a variety of commercial sources, including, without limitation, Invitrogen, Clontech, and Ariad. Additional examples of inducible promoters are known in the art.

[0213] Examples of inducible promoters regulated by exogenously supplied compounds include a zinc-inducible sheep metallothionine (MT) promoter, a dexamethasone (Dex)—inducible mouse mammary tumor virus (MMTV) promoter, a T7 polymerase promoter system (WO 98/10088, which is incorporated in its entirety herein by reference); an ecdysone insect promoter (No et al. Proc. Natl. Acad. Sci. U.S.A. 93:3346-3351, 1996, which is incorporated in its entirety herein by reference), a tetracycline-repressible system (Gossen et al. Proc. Natl. Acad. Sci. U.S.A. 89:5547-5551, 1992, which is incorporated in its entirety herein by reference), a tetracycline-inducible system (Gossen et al. Science 268:1766-1769, 1995, see also Harvey et al. Curr. Opin. Chem. Biol. 2:512-518, 1998, each of which is incorporated in its entirety herein by reference), an RU486-inducible system (Wang et al. Nat. Biotech. 15:239-243, 1997; and Wang et al. Gene Ther. 4:432-441, 1997, each of which is incorporated in its entirety herein by reference), and a rapamycin-inducible system (Magari et al. J. Clin. Invest. 100:2865-2872, 1997, which is incorporated in its entirety herein by reference).

[0214] In some embodiments, regulatory sequences impart tissue-specific gene expression capabilities. In some cases, tissue-specific regulatory sequences bind tissue-specific transcription factors that induce transcription in a tissue-specific manner.

[0215] The term “tissue-specific” promoter refers to a promoter that is active only in certain specific cell types and/or tissues (e.g., transcription of a specific gene occurs only within cells expressing transcription regulatory and/or control proteins that bind to the tissue-specific promoter).

[0216] In some embodiments, a tissue-specific promoter is a cochlea-specific promoter. In some embodiments, the tissue-specific promoter is a cochlear hair cell-specific promoter. Non-limiting examples of cochlear hair cell-specific promoters include but are not limited to an ATOH1 promoter, a POU4F3 promoter, an LHX3 promoter, a MYO7A promoter, a MYO6 promoter, an α9ACHR promoter, and aa α10ACHR promoter. In some embodiments, a promoter is a cochlear hair cell-specific promoter such as a PRESTIN promoter or an ONCOMOD promoter. See, e.g., Zheng et al., Nature 405:149-155, 2000; Tian et al. Dev. Dyn. 23 1: 199-203, 2004; and Ryan et al., Adv. Otorhinolaryngol. 66: 99-115, 2009, each of which is incorporated in their entirety herein by reference.

[0217] In some embodiments, a tissue-specific promoter is an ear cell specific promoter. In some embodiments, a tissue-specific promoter is an inner ear cell specific promoter. Non-limiting examples of inner ear non-sensory cell-specific promoters include but are not limited to: GJB2, GJB6, SLC26A4, TECTA, DFNA5, COCH, NDP, SYN1, GFAP, PLP, TAK1, or SOX21. In some embodiments, a cochlear non-sensory cell specific promoter may be an inner ear supporting cell specific promoter. Non-limiting examples of inner ear supporting cell specific promoters include but are not limited to: SOX2, FGFR3, PROX1, GLAST1, LGR5, HES1, HES5, NOTCH1, JAG1, CDKN1A, CDKN1B, SOX10, P75, CD44, HEY2, LFNG, or S100b.

[0218] In some embodiments, provided AAV constructs comprise a promoter sequence selected from a CAG, a CBA, a CMV, or a CB7 promoter. In some embodiments of any of the therapeutic compositions described herein, the first or sole AAV construct further includes at least one promoter sequence selected from Cochlea and/or inner ear specific promoters.

[0219] In some embodiments, a promoter sequence is at least 85%, 90%, 95%, 98% or 99% identical to any promoter sequence disclosed herein. By way of non-limiting example, promoter sequences provided in accordance with the present disclosure may be or comprise the following:

CMV Enhancer
(SEQ ID NO: 22)
GACATTGATTATTGACTAGTTATTAATAGTAATCAATTACGGGGTCATTAGTTCATAGCCCATA
TATGGAGTTCCGCGTTACATAACTTACGGTAAATGGCCCGCCTGGCTGACCGCCCAACGACCCC
CGCCCATTGACGTCAATAATGACGTATGTTCCCATAGTAACGCCAATAGGGACTTTCCATTGAC
GTCAATGGGTGGACTATTTACGGTAAACTGCCCACTTGGCAGTACATCAAGTGTATCATATGCC
AAGTACGCCCCCTATTGACGTCAATGACGGTAAATGGCCCGCCTGGCATTATGCCCAGTACATG
ACCTTATGGGACTTTCCTACTTGGCAGTACATCTACGTATTAGTCATCGCTATTACCATGG
CBA Gene Sequence
(SEQ ID NO: 23)
GTCGAGGTGAGCCCCACGTTCTGCTTCACTCTCCCCATCTCCCCCCCCTCCCCACCCCCAATTT
TGTATTTATTTATTTTTTAATTATTTTGTGCAGCGATGGGGGCGGGGGGGGGGGGGGGGCGCGC
GCCAGGCGGGGCGGGGCGGGGCGAGGGGCGGGGCGGGGCGAGGCGGAGAGGTGCGGCGGCAGCC
AATCAGAGCGGCGCGCTCCGAAAGTTTCCTTTTATGGCGAGGCGGCGGCGGCGGCGGCCCTATA
AAAAGCGAAGCGCGCGGCGGGCG
CBA promoter
(SEQ ID NO: 297)
GTCGAGGTGAGCCCCACGTTCTGCTTCACTCTCCCCATCTCCCCCCCCTCCCCACCCCCAATTT
TGTATTTATTTATTTTTTAATTATTTTGTGCAGCGATGGGGGCGGGGGGGGGGGGGGCGCGCGC
CAGGCGGGGCGGGGCGGGGCGAGGGGCGGGGCGGGGCGAGGCGGAGAGGTGCGGCGGCAGCCAA
TCAGAGCGGCGCGCTCCGAAAGTTTCCTTTTATGGCGAGGCGGCGGCGGCGGCGGCCCTATAAA
AAGCGAAGCGCGCGGCGGGCG
CMV/CBA enhancer/promoter
(SEQ ID NO: 298)
GACATTGATTATTGACTAGTTATTAATAGTAATCAATTACGGGGTCATTAGTTCATAGCCCATA
TATGGAGTTCCGCGTTACATAACTTACGGTAAATGGCCCGCCTGGCTGACCGCCCAACGACCCC
CGCCCATTGACGTCAATAATGACGTATGTTCCCATAGTAACGCCAATAGGGACTTTCCATTGAC
GTCAATGGGTGGACTATTTACGGTAAACTGCCCACTTGGCAGTACATCAAGTGTATCATATGCC
AAGTACGCCCCCTATTGACGTCAATGACGGTAAATGGCCCGCCTGGCATTATGCCCAGTACATG
ACCTTATGGGACTTTCCTACTTGGCAGTACATCTACGTATTAGTCATCGCTATTACCATGGGTC
GAGGTGAGCCCCACGTTCTGCTTCACTCTCCCCATCTCCCCCCCCTCCCCACCCCCAATTTTGT
ATTTATTTATTTTTTAATTATTTTGTGCAGCGATGGGGGCGGGGGGGGGGGGGGGGCGCGCGCC
AGGCGGGGCGGGGCGGGGCGAGGGGCGGGGCGGGGCGAGGCGGAGAGGTGCGGCGGCAGCCAAT
CAGAGCGGCGCGCTCCGAAAGTTTCCTTTTATGGCGAGGCGGCGGCGGCGGCGGCCCTATAAAA
AGCGAAGCGCGCGGCGGGCG
CMV/CBA enhancer/promoter
(SEQ ID NO: 299)
GACATTGATTATTGACTAGTTATTAATAGTAATCAATTACGGGGTCATTAGTTCATAGCCCATA
TATGGAGTTCCGCGTTACATAACTTACGGTAAATGGCCCGCCTGGCTGACCGCCCAACGACCCC
CGCCCATTGACGTCAATAATGACGTATGTTCCCATAGTAACGCCAATAGGGACTTTCCATTGAC
GTCAATGGGTGGACTATTTACGGTAAACTGCCCACTTGGCAGTACATCAAGTGTATCATATGCC
AAGTACGCCCCCTATTGACGTCAATGACGGTAAATGGCCCGCCTGGCATTATGCCCAGTACATG
ACCTTATGGGACTTTCCTACTTGGCAGTACATCTACGTATTAGTCATCGCTATTACCATGGGTC
GAGGTGAGCCCCACGTTCTGCTTCACTCTCCCCATCTCCCCCCCCTCCCCACCCCCAATTTTGT
ATTTATTTATTTTTTAATTATTTTGTGCAGCGATGGGGGCGGGGGGGGGGGGGGCGCGCGCCAG
GCGGGGCGGGGCGGGGCGAGGGGCGGGGCGGGGCGAGGCGGAGAGGTGCGGCGGCAGCCAATCA
GAGCGGCGCGCTCCGAAAGTTTCCTTTTATGGCGAGGCGGCGGCGGCGGCGGCCCTATAAAAAG
CGAAGCGCGCGGCGGGCG
CAG enhancer/promoter
(SEQ ID NO: 300)
GACATTGATTATTGACTAGTTATTAATAGTAATCAATTACGGGGTCATTAGTTCATAGCCCATA
TATGGAGTTCCGCGTTACATAACTTACGGTAAATGGCCCGCCTGGCTGACCGCCCAACGACCCC
CGCCCATTGACGTCAATAATGACGTATGTTCCCATAGTAACGCCAATAGGGACTTTCCATTGAC
GTCAATGGGTGGACTATTTACGGTAAACTGCCCACTTGGCAGTACATCAAGTGTATCATATGCC
AAGTACGCCCCCTATTGACGTCAATGACGGTAAATGGCCCGCCTGGCATTATGCCCAGTACATG
ACCTTATGGGACTTTCCTACTTGGCAGTACATCTACGTATTAGTCATCGCTATTACCATGGGTC
GAGGTGAGCCCCACGTTCTGCTTCACTCTCCCCATCTCCCCCCCCTCCCCACCCCCAATTTTGT
ATTTATTTATTTTTTAATTATTTTGTGCAGCGATGGGGGCGGGGGGGGGGGGGGGGCGCGCGCC
AGGCGGGGCGGGGCGGGGCGAGGGGCGGGGCGGGGCGAGGCGGAGAGGTGCGGCGGCAGCCAAT
CAGAGCGGCGCGCTCCGAAAGTTTCCTTTTATGGCGAGGCGGCGGCGGCGGCGGCCCTATAAAA
AGCGAAGCGCGCGGCGGGCGGGAGTCGCTGCGTTGCCTTCGCCCCGTGCCCCGCTCCGCGCCGC
CTCGCGCCGCCCGCCCCGGCTCTGACTGACCGCGTTACTCCCACAGGTGAGCGGGCGGGACGGC
CCTTCTCCTCCGGGCTGTAATTAGCGCTTGGTTTAATGACGGCTCGTTTCTTTTCTGTGGCTGC
GTGAAAGCCTTAAAGGGCTCCGGGAGGGCCCTTTGTGCGGGGGGGAGCGGCTCGGGGGGTGCGT
GCGTGTGTGTGTGCGTGGGGAGCGCCGCGTGCGGCCCGCGCTGCCCGGCGGCTGTGAGCGCTGC
GGGCGCGGCGCGGGGCTTTGTGCGCTCCGCGTGTGCGCGAGGGGAGCGCGGCCGGGGGCGGTGC
CCCGCGGTGCGGGGGGGCTGCGAGGGGAACAAAGGCTGCGTGCGGGGTGTGTGCGTGGGGGGGT
GAGCAGGGGGTGTGGGCGCGGCGGTCGGGCTGTAACCCCCCCCTGCACCCCCCTCCCCGAGTTG
CTGAGCACGGCCCGGCTTCGGGTGCGGGGCTCCGTGCGGGGCGTGGCGCGGGGCTCGCCGTGCC
GGGCGGGGGGTGGCGGCAGGTGGGGGTGCCGGGCGGGGCGGGGCCGCCTCGGGCCGGGGAGGGC
TCGGGGGAGGGGCGCGGCGGCCCCCGGAGCGCCGGCGGCTGTCGAGGCGCGGCGAGCCGCAGCC
ATTGCCTTTTATGGTAATCGTGCGAGAGGGCGCAGGGACTTCCTTTGTCCCAAATCTGTGCGGA
GCCGAAATCTGGGAGGCGCCGCCGCACCCCCTCTAGCGGGCGCGGGGCGAAGCGGTGCGGCGCC
GGCAGGAAGGAAATGGGCGGGGAGGGCCTTCGTGCGTCGCCGCGCCGCCGTCCCCTTCTCCCTC
TCCAGCCTCGGGGCTGTCCGCGGGGGGACGGCTGCCTTCGGGGGGGACGGGGCAGGGCGGGGTT
CGGCTTCTGGCGTGTGACCGGCGGCTCTAGAGCCTCTGCTAACCATGTTCATGCCTTCTTCTTT
TTCCTAGAG
CAG enhancer/promoter
(SEQ ID NO: 301)
GAGATTGATTATTGAGTAGTTATTAATAGTAATCAATTACGGGGTCATTAGTTCATAGCCCATA
TATGGAGTTCCGCGTTACATAACTTACGGTAAATGGCCCGCCTGGCTGACCGCCCAACGACCCC
CGCCCATTGAGGTCAATAATGAGGTATGTTCCCATAGTAACGCCAATAGGGAGTTTCCATTGAG
GTCAATGGGTGGACTATTTACGGTAAACTGCCCACTTGGCAGTACATCAAGTGTATCATATGCC
AAGTACGCCCCCTATTGACGTCAATGACGGTAAATGGCCCGCCTGGCATTATGCCCAGTACATG
ACCTTATGGGACTTTCCTACTTGGCAGTACATCTACGTATTAGTCATCGCTATTACCATGGGTC
GAGGTGAGCCCCACGTTCTGCTTCACTCTCCCCATCTCCCCCCCCTCCCCACCCCCAATTTTGT
ATTTATTTATTTTTTAATTATTTTGTGCAGCGATGGGGGCGGGGGGGGGGGGGGCGCGCGCCAG
GCGGGGCGGGGCGGGGCGAGGGGCGGGGCGGGGCGAGGCGGAGAGGTGCGGCGGCAGCCAATCA
GAGCGGCGCGCTCCGAAAGTTTCCTTTTATGGCGAGGCGGCGGCGGCGGCGGCCCTATAAAAAG
CGAAGCGCGCGGCGGGCGGGAGTCGCTGCGTTGCCTTCGCCCCGTGCCCCGCTCCGCGCCGCCT
CGCGCCGCCCGCCCCGGCTCTGACTGACCGCGTTACTCCCACAGGTGAGCGGGCGGGACGGCCC
TTCTCCTCCGGGCTGTAATTAGCGCTTGGTTTAATGACGGCTCGTTTCTTTTCTGTGGCTGCGT
GAAAGCCTTAAAGGGCTCCGGGAGGGCCCTTTGTGCGGGGGGGAGCGGCTCGGGGGGTGCGTGC
GTGTGTGTGTGCGTGGGGAGCGCCGCGTGCGGCCCGCGCTGCCCGGCGGCTGTGAGCGCTGCGG
GCGCGGCGCGGGGCTTTGTGCGCTCCGCGTGTGCGCGAGGGGAGCGCGGCCGGGGGCGGTGCCC
CGCGGTGCGGGGGGGCTGCGAGGGGAACAAAGGCTGCGTGCGGGGTGTGTGCGTGGGGGGGTGA
GCAGGGGGTGTGGGCGCGGCGGTCGGGCTGTAACCCCCCCCTGCACCCCCCTCCCCGAGTTGCT
GAGCACGGCCCGGCTTCGGGTGCGGGGCTCCGTGCGGGGCGTGGCGCGGGGCTCGCCGTGCCGG
GCGGGGGGTGGCGGCAGGTGGGGGTGCCGGGCGGGGCGGGGCCGCCTCGGGCCGGGGAGGGCTC
GGGGGAGGGGCGCGGCGGCCCCCGGAGCGCCGGCGGCTGTCGAGGCGCGGCGAGCCGCAGCCAT
TGCCTTTTATGGTAATCGTGCGAGAGGGCGCAGGGACTTCCTTTGTCCCAAATCTGTGCGGAGC
CGAAATCTGGGAGGCGCCGCCGCACCCCCTCTAGCGGGCGCGGGGCGAAGCGGTGCGGCGCCGG
CAGGAAGGAAATGGGCGGGGAGGGCCTTCGTGCGTCGCCGCGCCGCCGTCCCCTTCTCCCTCTC
CAGCCTCGGGGCTGTCCGCGGGGGGACGGCTGCCTTCGGGGGGGACGGGGCAGGGCGGGGTTCG
GCTTCTGGCGTGTGACCGGCGGCTCTAGAGCCTCTGCTAACCATGTTCATGCCTTCTTCTTTTT
CCTAGAG
Chimeric Intron
(SEQ ID NO: 24)
GGAGTCGCTGCGTTGCCTTCGCCCCGTGCCCCGCTCCGCGCCGCCTCGCGCCGCCCGCCCCGGC
TCTGACTGACCGCGTTACTCCCACAGGTGAGCGGGCGGGACGGCCCTTCTCCTCCGGGCTGTAA
TTAGCGCTTGGTTTAATGACGGCTCGTTTCTTTTCTGTGGCTGCGTGAAAGCCTTAAAGGGCTC
CGGGAGGGCCCTTTGTGCGGGGGGGAGCGGCTCGGGGGGTGCGTGCGTGTGTGTGTGCGTGGGG
AGCGCCGCGTGCGGCCCGCGCTGCCCGGCGGCTGTGAGCGCTGCGGGCGCGGCGCGGGGCTTTG
TGCGCTCCGCGTGTGCGCGAGGGGAGCGCGGCCGGGGGCGGTGCCCCGCGGTGCGGGGGGGCTG
CGAGGGGAACAAAGGCTGCGTGCGGGGTGTGTGCGTGGGGGGGTGAGCAGGGGGTGTGGGCGCG
GCGGTCGGGCTGTAACCCCCCCCTGCACCCCCCTCCCCGAGTTGCTGAGCACGGCCCGGCTTCG
GGTGCGGGGCTCCGTGCGGGGCGTGGCGCGGGGCTCGCCGTGCCGGGCGGGGGGTGGCGGCAGG
TGGGGGTGCCGGGCGGGGCGGGGCCGCCTCGGGCCGGGGAGGGCTCGGGGGAGGGGCGCGGCGG
CCCCCGGAGCGCCGGCGGCTGTCGAGGCGCGGCGAGCCGCAGCCATTGCCTTTTATGGTAATCG
TGCGAGAGGGCGCAGGGACTTCCTTTGTCCCAAATCTGTGCGGAGCCGAAATCTGGGAGGCGCC
GCCGCACCCCCTCTAGCGGGCGCGGGGCGAAGCGGTGCGGCGCCGGCAGGAAGGAAATGGGCGG
GGAGGGCCTTCGTGCGTCGCCGCGCCGCCGTCCCCTTCTCCCTCTCCAGCCTCGGGGCTGTCCG
CGGGGGGACGGCTGCCTTCGGGGGGGACGGGGCAGGGCGGGGTTCGGCTTCTGGCGTGTGACCG
GCGGCTCTAGAGCCTCTGCTAACCATGTTCATGCCTTCTTCTTTTTCCTACAG

[0220] In certain embodiments, a promoter is an endogenous human ATOH1 enhancer-promoter as set forth in SEQ ID NO: 302. In some embodiments, an enhancer-promoter sequence is at least 85%, 90%, 95%, 98% or 99% identical to enhancer-promoter sequence represented by SEQ ID NO: 302.

Human ATOH1 enhancer-promoter
(SEQ ID NO: 302)
CTATGGAGTTTGCATAACAAACGTTTGGCAGCTCGCTCTCTTACACTCCA
TTAACAAGCTGTAACATATAGCTGCAGGTTGCTATAATCTCATTAATATT
TTGGAAACTTGAATATTGAGTATTTCTGAGTGCTCATTCCCCATATGCCA
GCCACTTCTGCCATGCTGACTGGTTCCTTTCTCTCCATTATTAGCAATTA
GCTTCTTACCTTCCAAAGTCAGATCCAAGGTATCCAAGATACTAGCAAAG
GAATCAACTATGTGTGCAAGTTAAGCATGCTTAATATCACCCAAACAAAC
AAAGAGGCAGCATTTCTTAAAGTAATGAAGATAGATAAATCGGGTTAGTC
CTTTGCGACACTGCTGGTGCTTTCTAGAGTTTTATATATTTTAAGCAGCT
TGCTTTATATTCTGTCTTTGCCTCCCACCCCACCAGCACTTTTATTTGTG
GAGGGTTTTGGCTCGCCACACTTTGGGAAACTTATTTGATTTCACGGAGA
GCTGAAGGAAGATCATTTTTGGCAACAGACAAGTTTAAACACGATTTCTA
TGGGACATTGCTAACTGGGGCCCCTAAGGAGAAAGGGGAAACTGAGCGGA
GAATGGGTTAAATCCTTGGAAGCAGGGGAGAGGCAGGGGAGGAGAGAAGT
CGGAGGAGTATAAAGAAAAGGACAGGAACCAAGAAGCGTGGGGGTGGTTT
GCCGTAATGTGAGTGTTTCTTAATTAGAGAACGGTTGACAATAGAGGGTC
TGGCAGAGGCTCCTGGCCGCGGTGCGGAGCGTCTGGAGCGGAGCACGCGC
TGTCAGCTGGTGAGCGCACTCTCCTTTCAGGCAGCTCCCCGGGGAGCTGT
GCGGCCACATTTAACACCATCATCACCCCTCCCCGGCCTCCTCAACCTCG
GCCTCCTCCTCGTCGACAGCCTTCCTTGGCCCCCACCAGCAGAGCTCACA
GTAGCGAGCGTCTCTCGCCGTCTCCCGCACTCGGCCGGGGCCTCTCTCCT
CCCCCAGCTGCGCAGCGGGAGCCGCCACTGCCCACTGCACCTCCCAGCAA
CCAGCCCAGCACGCAAAGAAGCTGCGCAAAGTTAAAGCCAAGCAATGCCA
AGGGGAGGGGAAGCTGGAGGCGGGCTTTGAGTGGCTTCTGGGCGCCTGGC
GGGTCCAGAATCGCCCAGAGCCGCCCGCGGTCGTGCACATCTGACCCGAG
TCAGCTTGGGCACCAGCCGAGAGCCGGCTCCGCACCGCTCCCGCACCCCA
GCCGCCGGGGTGGTGACACACACCGGAGTCGAATTACAGGCCTGCAATTA
ACATATGAATCTGAGGAATTTAAAAGAAGGAAAAAAAAAAAAAAACCTGA
GCAGGCTTGGGAGTCCTCTGCACACAAGAACTTTTCTCGGGGTGTAAAAA
CTCTTTGATTGGCTGCTCGCACGCGCCTGCCCGCGCCCTCCATTGGCTGA
GAAGACACGCGACCGGCGCGAGGAGGGGGTTGGGAGAGGAGCGGGGGGAG
ACTGAGTGGCGCGTGCCGCTTTTTAAAGGGGCGCAGCGCCTTCAGCAACC
GGAGAAGCATAGTTGCACGCGACCTGGTGTGTGATCTCCGAGTGGGTGGG
GGAGGGTCGAGGAGGGAAAAAAAAATAAGACGTTGCAGAAGAGACCCGGA
AAGGGCCTTTTTTTTGGTTGAGCTGGTGTCCCAGTGCTGCCTCCGATCCT
GAGCCTCCGAGCCTTTGCAGTGCAA

[0221] In certain embodiments, a promoter is an endogenous human SLC26A4 immediate promoter as set forth in SEQ ID NO: 303 or 304. In certain embodiments, a promoter is an endogenous human SLC26A4 enhancer-promoter as set forth in SEQ ID NO: 305, 306, or 307. In some embodiments, an enhancer-promoter sequence is at least 85%, 90%, 95%, 98% or 99% identical to a promoter or enhancer-promoter sequence represented by SEQ ID NO: 303, 304, 305, 306, or 307. In certain embodiments, a promoter is a human SLC26A4 endogenous enhancer-promoter sequence comprised within SEQ ID NO: 305, 306, or 307.

Human SLC26A4 immediate promoter
(SEQ ID NO: 303)
CTGCCTTCTGAGAGCGCTATAAAGGCAGCGGAAGGGTAGTCCGCGGGGCATTCCGGGCGG
Human SLC26A4 immediate promoter
(SEQ ID NO: 304)
CTCTAGGCGGGCTCTGCTCTTCTTTAAGGAGTCCCACAGGGCCTGGCCCGCCCCTGACCT
Human SLC26A4 enhancer-promoter
(SEQ ID NO: 305)
TAAAGAGTTGTGAGTTGTGTAGGTGAGTTGCCATGGAGCTACAAATATGAGTTGATATTCTGAA
ATCCTAGACAGCCATCTCCAAGGTTAAGAAAAATCCTTATGCACTCACTTGCAAAGATATCCAC
AGCATGCTCTTAATGGAGAAAAACAAAGCCTTAGATCAAATATGTAAAGTAATTTTTAGTTTTT
TGAAAAGGTATGTTTGGGCTATAGATAAATCTGTTCAAAAAACATGAGAGAAGATAATAATGGT
TGAAAGGAGACACAGTGCTTGCCCTCAAGAAGTTTTTGTCTAGTGAGGGAGAGAGAACTTGTAT
GTAAATAAAATTGTGTTACTAAGGTAGATAGTGAGAAGTAACTTAAGAGAGGATCAGATAAGGT
ATTAAGAGAATACAGAAAAGGGTCTGGATTAATTCTGAACAGCATCAAAGAATGTTCTTGCAAG
AGATAGTGTTTTCACCAGATCTTGAAGGTATGGATGAGGGTATACAGAGTGAGTATATTCAGAT
TCTACTTTAAAACAAATACTTTCCTCTGTTGTAGTGGAGTTGAGCTATACATCCAACAATAATG
AAAAAATACACGCATATATACATATATGGAGAGAGATACATATTTTAGTAGATGTAGCAATTGA
TTAATAAATGTACAGTTTAAGTCGCATGCAAAACCTTGGAGTGATAGCAAACTTCATTGTAGGA
TGTTTAGCAGCATCTCTGGTCTCTACTCACTAGATCCCAATAGCATCTCCCTAGGTGTGACAAC
CAAAAATGTCTCCAGGCATTGACCTCTGGAGGCAAAAAAAGCCCTTTATTAAGAACCAGTGGTA
TACATAAGTAAAACATACACAAGAGATTCCTCCCCTCTTCTCTGTATGTGAATAAAAATTGCAA
AGTTCATGACCTGGATTTTCCTTTTAGGTTTCTTCTTTAGTGGTTCTTAACTTCATTGGGTGAA
GTAAGCCTTTGAAGATCTGTTGAAAGCTGTTGACTCATTCACTTCTCAGGAAAACGCACATGCT
GACTACCATTTCAGAGAATTTGCATCAGGGTTCTCTGGGGAGGAGTTCTGAGTTCTGTTTCCAG
GAGCTCGTAGAATTGTCATGGTCTGCATATGCAAGGCAGGTGGATTACGGAAGGTTGATGTACA
GAGGTCTGTATTTTGGAGCCTCTTCTGTATTTACTTCAGAACACTAACAATCAGGCGAGAATGT
TCTGGTTTATCAAACCCTTCCTTCTGCCTTTCATCTTAACCATGCATTAGTTTTAACAAAGTTC
ATCCCAACAGAAGACAAAACACTGATGAGGTAGGATAGCTCCAGCTCCTCCTCCCTCTCTTCTA
GTCTTGATTTCCATGTAGTCCAGTTTATTCCTTCCCTGATTGTCCAGGAGAATGAGAAAAAGAA
AAAACAGAGTCTAGTGGGTAAGAAAGGGCCACCTGGACGGCTTGATTTGGATTGTGAAATAAAA
CACACACACATGCACACGTAGAATAAGTGGCTAAAATCTGAGTAAATCGTGAACTCTCTGTATC
CTCCACCCATTGAATACTCCTAAAAGACTTTCTAGAAATTCAAGGACTTATTAATATAGAAACC
TGGCCATTGTTCCTCTTCTCCTCCCCATGTGGTATGAGAGCACCTGTGGCAGGCTCCCAGAGAC
CACGGACCTCTTCCTCTAGGCGGGCTCTGCTCTTCTTTAAGGAGTCCCACAGGGCCTGGCCCGC
CCCTGACCTCGCAACCCTTGAGATTAGTAACGGGATGAGTGAGGATCCGGGTGGCCCCTGCGTG
GCAGCCAGTAAGAGTCTCAGCCTTCCCGGTTCGGGAAAGGGGAAGAATGCAGGAGGGGTAGGAT
TTCTTTCCTGATAGGATCGGTTGGGAAAGACCGCAGCCTGTGTGTGTCTTTCCCTTCGACCAAG
GTGTCTGTTGCTCCGTAAATAAAACGTCCCACTGCCTTCTGAGAGCGCTATAAAGGCAGCGGAA
GGGTAGTCCGCGGGGC
Human SLC26A4 enhancer-promoter
(SEQ ID NO: 306)
GGCTGCTCGGAAAACAGGACGAGGGGAGAGACTTGCTCAATAAGCTGAAAGTTCTGCCCCCGAG
AGGGCTGCGACAGCTGCTGGAATGTGCCTGCAGCGTCCGCCTCTTGGGGACCCGCGGAGCGCGC
CCTGACGGTTCCACGCCTGGCCCGGGGGTCTGCACCTCTCCTCCAGTGCGCACCTGGAGCTGCG
TCCCGGGTCAGGTGCGGGGAGGGAGGGAATCTCAGTGTCCCCTTCCAGCCTTGCAAGCGCCTTT
GGCCCCTGCCCCAGCCCCTCGGTTTGGGGGAGATTTCAGAACGCGGACAGCGCCCTGGCTGCGG
GCCATAGGGGACTGGGTGGAACTCGGGAAGCCCCCAGAGCAGGGGCTTACTCGCTTCAAGTTTG
GGGAACCCCGGGCAGCGGGTGCAGGCCACGAGACCCGAAGGTTCTCAGGTGCCCCCCTGCAGGC
TGGCCGTGCGCGCCGTGGGGCGCTTGTCGCGAGCGCCGAGGGCTGCAGGACGCGGACCAGACTC
GCGGTGCAGGGGGGCCTGGCTGCAGCTAACAGGTGATCCCGTTCTTTCTGTTCCTCGCTCTTCC
CCTCCGATCGTCCTCGCTTACCGCGTGTCCTCCCTCCTCGCTGTCCTCTGGCTCGCAGGTCATG
GCAGCGCCAGGCGGCAGGTCGGAGCCGCCGCAGCTCCCCGAGTACAGCTGCAGCTACATGGTGT
CGCGGCCGGTCTACAGCGAGCTCGCTTTCCAGCAACAGCACGAGCGGCGCCTGCAGGAGCGCAA
GACGCTGCGGGAGAGCCTGGCCAAGTGCTGCAGGTAGCGGCCGCGCGGGCCTGCGTAGAGAGAA
GCGGAGCGGGGCGTCCACGCCTTGGGGAGGGAAGGGCGTCCCCAGCGGGCGAGAGTGGGGTGCG
GGCGGCGGAGCCCCTGGGCGCCAGCTGCTTCTCCCAGAGGCCCGACTTTCGGTCTCCGGTCCTC
CACGCCGCCCTTCTGGTGGGAGGGTGGCTCCATCAGTCTCGGGCCCGAAATGAACTTACCTGGG
AAACTCGCCTTTGGGGAGAGTGGGTTCTAGGAGCCCCGTCTCTCTTTTTCCTCTCTGAAGGAAA
CTTGGAGTGCCTCTTGGGGTACAGTGGGTCCCTGTTGCCTTCTTGGGAGCTTGTTTAAATGAAA
TGAATAGGGAAACCCAGCTCTTGACCAGGAGGAGTCCTTGAAACACTCAAGCTAAGTAGGCGGG
CTACCATTCAGTTAGAGACCAGGATGCAAGCTAGAACCCAGGGGAGCGCGGGGTGTGCCAAGTA
CTTCATCAGCAGGCTGTGGGACCCCTGGGGAAAGCCACCCTCAGTCTCTAAACCCAAACATGCC
GTAACTAGATGTCACAAACATAAAGAAATTAGAGTTTCTAAAACCTTTCATTATAG
Human SLC26A4 enhancer-promoter
(SEQ ID NO: 307)
CGGAAGGTTGATGTACAGAGGTCTGTATTTTGGAGCCTCTTCTGTATTTACTTCAGAACACTAA
CAATCAGGCGAGAATGTTCTGGTTTATCAAACCCTTCCTTCTGCCTTTCATCTTAACCATGCAT
TAGTTTTAACAAAGTTCATCCCAACAGAAGACAAAACACTGATGAGGTAGGATAGCTCCAGCTC
CTCCTCCCTCTCTTCTAGTCTTGATTTCCATGTAGTCCAGTTTATTCCTTCCCTGATTGTCCAG
GAGAATGAGAAAAAGAAAAAACAGAGTCTAGTGGGTAAGAAAGGGCCACCTGGACGGCTTGATT
TGGATTGTGAAATAAAACACACACACATGCACACGTAGAATAAGTGGCTAAAATCTGAGTAAAT
CGTGAACTCTCTGTATCCTCCACCCATTGAATACTCCTAAAAGACTTTCTAGAAATTCAAGGAC
TTATTAATATAGAAACCTGGCCATTGTTCCTCTTCTCCTCCCCATGTGGTATGAGAGCACCTGT
GGCAGGCTCCCAGAGACCACGGACCTCTTCCTCTAGGCGGGCTCTGCTCTTCTTTAAGGAGTCC
CACAGGGCCTGGCCCGCCCCTGACCTCGCAACCCTTGAGATTAGTAACGGGATGAGTGAGGATC
CGGGTGGCCCCTGCGTGGCAGCCAGTAAGAGTCTCAGCCTTCCCGGTTCGGGAAAGGGGAAGAA
TGCAGGAGGGGTAGGATTTCTTTCCTGATAGGATCGGTTGGGAAAGACCGCAGCCTGTGTGTGT
CTTTCCCTTCGACCAAGGTGTCTGTTGCTCCGTAAATAAAACGTCCCACTGCCTTCTGAGAGCG
CTATAAAGGCAGCGGAAGGGTAGTCCGCGGGGCATTCCGGGCGGGGCGCGAGCAGAGACAGGTG
AGTT

[0222] In certain embodiments, a promoter is a human LGR5 enhancer-promoter as set forth in SEQ ID NO: 308. In some embodiments, an enhancer-promoter sequence is at least 85%, 90%, 95%, 98% or 99% identical to enhancer-promoter sequence represented by SEQ ID NO: 308. In some embodiments, a promoter is a human LGR5 endogenous enhancer-promoter sequence comprised within SEQ ID NO: 308.

Human LGR5 enhancer-promoter
(SEQ ID NO: 308)
AGGGCTATTTGTACCTCAACGAGGGCTTCTCTCCAAGAAAGCCCTGAATC
CTTTTCCTCCTTTTTCCTGCAGATTCACTATAGGACACTTTTTGAAGCAA
GAGCATGCATTTTCCCCCTGGCGCTCTGCAGCGGTTCTCAGAGCCCAGTG
TCACTCACATAGGTGGGACTGCTCTCAGTTCAGAGAGCGCTGGGACACTT
AAGATGAAAAGTCCCTGGAAGTTAGCAAACAGCCATCTGTCACTCTGGCA
TCGATTTAGTAAAAGTGAGTTCTAGGGTATTCTAAACGAGTTTTAAAAAA
CAAATGAGTGAGTTCGAGTTCCTCACCCCGCAAGAGATAGGAAGGCAGCA
GTGGAGTGCTCGCTCAGGAGCTGTATTTGTTTAGCGATTAGCCTAGAGCT
TTGATTTTAGGGCAAAAGCGAGCCAGACAGTGCGGCAGACGTAAGGATCA
AAAAGGCCACCTATCATTCGCCGGGGACGCCTGCCTCCTTACCCTGATAA
CGTAACTATTTCTCTGCATAGGATTTTAGTTTTTGTGTTTTTGTTTTGTT
TTATTCTGTTTAATCACTTCAAGTATCTCATCCATTATTTGAAGCGGGCT
CGGAGGAAACGTGCCGCATCCTCCAGTCCTTGTGCGTCTGTTTAGGTCTC
TCCGAAGCAGGTCCCTCTCGACTCTTAGATCTGGGTCTCCAGCACGCATG
AAGGGGTAAGGGTGGGGGGGTCCCCTATTCCGGCGCGCGGCGTTGAGCAC
TGAATCTTCCAGGCGGAGGCTCAGTGGGAGCGCCGAGAACTCGCCAGTAC
CGCGCGCTGCCTGCTGCCTGCTGCCTCCCAGCCCAGGACTTGGGAAAGGA
GGGAGGGGACAAGTGGAGGGAAAGTGGGGCCGGGCGGGGGGTGCCTGGGA
AGCCAGGCTGCGCTGACGTCACTGGGCGCGCAATTCGGGCTGGAGCGCTT
TAAAAAACGAGCGTGCAAGCAGAGATGCTGCTCCACACCGCTCAGGCCGC
GAGCAGCAGCAAGGCGCACCGCCACTGTCGCCGCTGCAGCCAGGGCTGCT
CCGAAGGCCGGCGTGGCGGCAACCGGCACCTCTGTCCCCGCCGCGCTTCT
CCTCGCCGCCCACGCCGTGGGGTCAGGAACGCGGCGTCTGGCGCTGCAGA
CGCCCGCTGAGTTGCAGAAGCCCACGGAGCGGCGCCCGGCGCGCCACGGC
CCGTAGCAGTCCGGTGCTGCTCTCCGCCCGCGTCCGGCTCGTGGCCCCCT
ACTTCGGGCACCGACCGGT

[0223] In certain embodiments, a promoter is a human SYN1 enhancer-promoter as set forth in SEQ ID NO: 309. In some embodiments, an enhancer-promoter sequence is at least 85%, 90%, 95%, 98% or 99% identical to enhancer-promoter sequence represented by SEQ ID NO: 309. In some embodiments, a promoter is a human SYN1 endogenous enhancer-promoter sequence comprised within SEQ ID NO: 309.

Human SYN1 enhancer-promoter
(SEQ ID NO: 309)
TGCGTATGAGTGCAAGTGGGTTTTAGGACCAGGATGAGGCGGGGTGGGGG
TGCCTACCTGACGACCGACCCCGACCCACTGGACAAGCACCCAACCCCCA
TTCCCCAAATTGCGCATCCCCTATCAGAGAGGGGGAGGGGAAACAGGATG
CGGCGAGGCGCGTGCGCACTGCCAGCTTCAGCACCGCGGACAGTGCCTTC
GCCCCCGCCTGGCGGCGCGCGCCACCGCCGCCTCAGCACTGAAGGCGCGC
TGACGTCACTCGCCGGTCCCCCGCAAACTCCCCTTCCCGGCCACCTTGGT
CGCGTCCGCGCCGCCGCCGGCCCAGCCGGACCGCACCACGCGAGGCGCGA
GATAGGGGGGCACGGGCGCGACCATCTGCGCTGCGGCGCCGGCGACTCAG
CGCTGCCTCAGTCTGCGGTGGGCAGCGGAGGAGTCGTGTCGTGCCTGAGA
GCGCAGTCGAGAA

[0224] In certain embodiments, a promoter is a human GFAP enhancer-promoter as set forth in SEQ ID NO: 310. In some embodiments, an enhancer-promoter sequence is at least 85%, 90%, 95%, 98% or 99% identical to enhancer-promoter sequence represented by SEQ ID NO: 310. In some embodiments, a promoter is a human GFAP endogenous enhancer-promoter sequence comprised within SEQ ID NO: 310.

Human GFAP enhancer-promoter
(SEQ ID NO: 310)
CCCACCTCCCTCTCTGTGCTGGGACTCACAGAGGGAGACCTCAGGAGGCAGTCTGTCCATCACA
TGTCCAAATGCAGAGCATACCCTGGGCTGGGCGCAGTGGCGCACAACTGTAATTCCAGCACTTT
GGGAGGCTGATGTGGAAGGATCACTTGAGCCCAGAAGTTCTAGACCAGCCTGGGCAACATGGCA
AGACCCTATCTCTACAAAAAAAGTTAAAAAATGAGCCACGTGTGGTGAGACACACCTGTAGTCC
CAGCTATTCAGGAGGCTGAGGTGAGGGGATCACTTAAGGCTGGGAGGTTGAGGCTGCAGTGAGT
CGTGGTTGCGCCACTGCACTCCAGCCTGGGCAACAGTGAGACCCTGTCTCAAAAGACAAAAAAA
AAAAAAAAAAAAAAAAGAACATATCCTGGTGTGGAGTAGGGGACGCTGCTCTGACAGAGGCTCG
GGGGCCTGAGCTGGCTCTGTGAGCTGGGGAGGAGGCAGACAGCCAGGCCTTGTCTGCAAGCAGA
CCTGGCAGCATTGGGCTGGCCGCCCCCCAGGGCCTCCTCTTCATGCCCAGTGAATGACTCACCT
TGGCACAGACACAATGTTCGGGGTGGGCACAGTGCCTGCTTCCCGCCGCACCCCAGCCCCCCTC
AAATGCCTTCCGAGAAGCCCATTGAGCAGGGGGCTTGCATTGCACCCCAGCCTGACAGCCTGGC
ATCTTGGGATAAAAGCAGCACAGCCCCCTAGGGGCTGCCCTTGCTGTGTGGCGCCACCGGCGGT
GGAGAACAAGGCTCTATTCAGCCTGTGCCCAGGAAAGGGGATCAGGGGATGCCCAGGCATGGAC
AGTGGGTGGCAGGGGGGGAGAGGAGGGCTGTCTGCTTCCCAGAAGTCCAAGGACACAAATGGGT
GAGGGGACTGGGCAGGGTTCTGACCCTGTGGGACCAGAGTGGAGGGCGTAGATGGACCTGAAGT
CTCCAGGGACAACAGGGCCCAGGTCTCAGGCTCCTAGTTGGGCCCAGTGGCTCCAGCGTTTCCA
AACCCATCCATCCCCAGAGGTTCTTCCCATCTCTCCAGGCTGATGTGTGGGAACTCGAGGAAAT
AAATCTCCAGTGGGAGACGGAGGGGTGGCCAGGGAAACGGGGCGCTGCAGGAATAAAGACGAGC
CAGCACAGCCAGCTCATGTGTAACGGCTTTGTGGAGCTGTCAAGGCCTGGTCTCTGGGAGAGAG
GCACAGGGAGGCCAGACAAGGAAGGGGTGACCTGGAGGGACAGATCCAGGGGCTAAAGTCCTGA
TAAGGCAAGAGAGTGCCGGCCCCCTCTTGCCCTATCAGGACCTCCACTGCCACATAGAGGCCAT
GATTGACCCTTAGACAAAGGGCTGGTGTCCAATCCCAGCCCCCAGCCCCAGAACTCCAGGGAAT
GAATGGGCAGAGAGCAGGAATGTGGGACATCTGTGTTCAAGGGAAGGACTCCAGGAGTCTGCTG
GGAATGAGGCCTAGTAGGAAATGAGGTGGCCCTTGAGGGTACAGAACAGGTTCATTCTTCGCCA
AATTCCCAGCACCTTGCAGGCACTTACAGCTGAGTGAGATAATGCCTGGGTTATGAAATCAAAA
AGTTGGAAAGCAGGTCAGAGGTCATCTGGTACAGCCCTTCCTTCCCTTTTTTTTTTTTTTTTTT
GTGAGACAAGGTCTCTCTCTGTTGCCCAGGCTGGAGTGGCGCAAACACAGCTCACTGCAGCCTC
AACCTACTGGGCTCAAGCAATCCTCCAGCCTCAGCCTCCCAAAGTGCTGGGATTACAAGCATGA
GCCACCCCACTCAGCCCTTTCCTTCCTTTTTAATTGATGCATAATAATTGTAAGTATTCATCAT
GGTCCAACCAACCCTTTCTTGACCCACCTTCCTAGAGAGAGGGTCCTCTTGCTTCAGCGGTCAG
GGCCCCAGACCCATGGTCTGGCTCCAGGTACCACCTGCCTCATGCAGGAGTTGGCGTGCCCAGG
AAGCTCTGCCTCTGGGCACAGTGACCTCAGTGGGGTGAGGGGAGCTCTCCCCATAGCTGGGCTG
CGGCCCAACCCCACCCCCTCAGGCTATGCCAGGGGGTGTTGCCAGGGGCACCCGGGCATCGCCA
GTCTAGCCCACTCCTTCATAAAGCCCTCGCATCCCAGGAGCGAGCAGAGCCAGAGCAGGTTGGA
GAGGAGACGCATCACCTCCGCTGCTCGC

vi. Enhancers and 5′ cap

[0225] In some instances, a construct can include a promoter sequence and/or an enhancer sequence. In some embodiments, an enhancer is a nucleotide sequence that can increase a level of transcription of a nucleic acid encoding a protein of interest (e.g., a KCNQ4 protein). In some embodiments, enhancer sequences (50-1500 base pairs in length) generally increase a level of transcription by providing additional binding sites for transcription-associated proteins (e.g., transcription factors). In some embodiments, an enhancer sequence is found within an intronic sequence. Unlike promoter sequences, enhancer sequences can act at much larger distance away from a transcription start site (e.g., as compared to a promoter). Non-limiting examples of enhancers include a RSV enhancer, a CMV enhancer, and a SV40 enhancer. An example of a CMV enhancer is described in, e.g., Boshart et al., Cell 41(2):521-530, 1985, which is incorporated in its entirety herein by reference.

[0226] As described herein, a 5′ cap (also termed an RNA cap, an RNA 7-methylguanosine cap or an RNA m.sup.7G cap) is a modified guanine nucleotide that has been added to a “front” or 5′ end of a eukaryotic messenger RNA shortly after a start of transcription. In some embodiments, a 5′ cap consists of a terminal group which is linked to a first transcribed nucleotide. Its presence is critical for recognition by a ribosome and protection from RNases. Cap addition is coupled to transcription, and occurs co-transcriptionally, such that each influences the other. Shortly after start of transcription, a 5′ end of an mRNA being synthesized is bound by a cap-synthesizing complex associated with RNA polymerase. This enzymatic complex catalyzes a chemical reactions that are required for mRNA capping. Synthesis proceeds as a multi-step biochemical reaction. A capping moiety can be modified to modulate functionality of mRNA such as its stability or efficiency of translation.

vii. Untranslated Regions (UTRs)

[0227] In some embodiments, any constructs described herein can include one or more untranslated regions. In some embodiments, a construct can include a 5′ UTR and/or a 3′ UTR. In some embodiments, if more than one UTR is present, UTRs may come from a single gene or more than one gene.

[0228] As is understood by those of skill in the art, an untranslated region (UTR) of a gene is transcribed but not translated. In some embodiments, a 5′ UTR starts at a transcription start site and continues to a start codon but does not include that start codon. In some embodiments, a 3′ UTR starts immediately following a stop codon and continues until a transcriptional termination signal. Without wishing to be bound by any particular theory, there is a growing body of evidence regarding regulatory roles played by UTRs in terms of stability of nucleic acid molecule and translation. In some embodiments, regulatory features of a UTR can be incorporated into any technologies (e.g., constructs, compositions, kits, or methods) as described herein to, e.g., enhance stability of a KCNQ4 protein.

[0229] For example, in some embodiments, a 5′ UTR is included in any constructs described herein. Non-limiting examples of 5′ UTRs including those from the following genes: albumin, serum amyloid A, Apolipoprotein A/B/E, transferrin, alpha fetoprotein, erythropoietin, and Factor VIII, can be used to enhance expression of a nucleic acid molecule, such as a mRNA. In some embodiments, 5′ UTRs have also been known, e.g., to form secondary structures that are involved in elongation factor binding.

[0230] In some embodiments, a 5′ UTR from an mRNA that is transcribed by a cell in a cochlea can be included in any technologies (e.g., constructs, compositions, kits, and methods) described herein.

[0231] In some embodiments, 3′ UTRs are known to have stretches of adenosines and uridines embedded in them. These AU-rich signatures are particularly prevalent in genes with high rates of turnover. Based on their sequence features and functional properties, AU-rich elements (AREs) can be separated into three classes (Chen et al., Mol. Cell. Biol. 15:5777-5788, 1995; Chen et al., Mol. Cell Biol. 15:2010-2018, 1995, each of which is incorporated in its entirety herein by reference): Class I AREs contain several dispersed copies of an AUUUA motif within U-rich regions. For example, c-Myc and MyoD mRNAs contain class I AREs. Class II AREs possess two or more overlapping UUAUUUA(U/A) (U/A) nonamers. GM-CSF and TNF-alpha mRNAs are examples that contain class II AREs. Class III AREs are less well defined. These U-rich regions do not contain an AUUUA motif. Two well-studied examples of this class are c-Jun and myogenin mRNAs.

[0232] Most proteins binding to AREs are known to destabilize a messenger, whereas members of the ELAV family, most notably HuR, have been documented to increase stability of mRNA. HuR binds to AREs of all three classes. Engineering HuR specific binding sites into a 3′ UTR of nucleic acid molecules will lead to HuR binding and thus, stabilization of a message in vivo.

[0233] In some embodiments, introduction, removal, or modification of 3′ UTR AREs can be used to modulate stability of an mRNA encoding a KCNQ4 protein (Kv7.4). In other embodiments, AREs can be removed or mutated to increase intracellular stability and thus increase translation and production of a KCNQ4 protein (Kv7.4).

[0234] In some embodiments, a UTR sequence is at least 85%, 90%, 95%, 98% or 99% identical to any UTR sequence disclosed herein (e.g., SEQ ID Nos: 25, 26, 27, 28, 29, and/or 30). By way of non-limiting example, untranslated regions may be or comprise the following:

HUMAN 5′ UTR SEQUENCE FROM ENDOGENOUS KCNQ4
TRANSCIRPT VARIANT 1
(SEQ ID NO: 25)
GACATGTGAGCGGCGCGCGCCGGTGGCAGGTGGAAAGGCGAGCGGCATGGAGCGCGTAATAAGA
GAGTTGGAGTCGGAAAGAGCAGCCCCAGTCGCCGGGGAAGCGGGAGGTCAGTGCGGGCTCCGGC
GGCCCCCAGGCTCCGAGCGCCCGCCCGCGGCCCCGGCCCGGCCCCTAGCCCCCGCCGCCCGCGC
CCGCCCCGGGTCGCCCCTCTGGCCCCGGGTCCGAGCCATGCGTCTCTGAGCGCCCCGAGCGCGC
CCCCGCCCCGGACCGTGCCCGGGCCCCGGCGCCCCCAGCCCGGCGCCGCCC
HUMAN 5′ UTR SEQUENCE FROM ENDOGENOUS KCNQ4
TRANSCIRPT VARIANT 2
(SEQ ID NO: 26)
GACATGTGAGCGGCGCGCGCCGGTGGCAGGTGGAAAGGCGAGCGGCATGGAGCGCGTAATAAGA
GAGTTGGAGTCGGAAAGAGCAGCCCCAGTCGCCGGGGAAGCGGGAGGTCAGTGCGGGCTCCGGC
GGCCCCCAGGCTCCGAGCGCCCGCCCGCGGCCCCGGCCCGGCCCCTAGCCCCCGCCGCCCGCGC
CCGCCCCGGGTCGCCCCTCTGGCCCCGGGTCCGAGCCATGCGTCTCTGAGCGCCCCGAGCGCGC
CCCCGCCCCGGACCGTGCCCGGGCCCCGGCGCCCCCAGCCCGGCGCCGCCC
HUMAN 5′ UTR SEQUENCE FROM ENDOGENOUS KCNQ4
TRANSCRIPT VARIANT X1
(SEQ ID NO: 27)
GACCACTCGTACCACAAAGTGGGCAGCTGAGGAGCTGATCACCGCCTGGTACATCGGGTTCCTG
GTGCTCATCTTCGCCTCCTTCCTGGTCTACCTGGCTGAGAAGGACGCCAACTCCGACTTCTCCT
CCTACGCCGACTCGCTCTGGTGGGGGACGATTACATTGACAACCATCGGCTATGGTGACAAGAC
ACCGCACACATGGCTGGGCAGGGTCCTGGCTGCTGGCTTCGCCTTACTGGGCATCTCTTTCTTT
GCCCTGCCTGCCGGCATCCTAGGCTCCGGCTTTGCCCTGAAGGTCCAGGAGCAGCACCGGCAGA
AGCACTTCGAGAAGCGGAGG
HUMAN 3′ UTR SEQUENCE FROM ENDOGENOUS KCNQ4
TRANSCIRPT VARIANT 1
(SEQ ID NO: 28)
GGGACTTCTCAGAGGCAGGGCAGCACACGGCCAGCCCCGCGGCCTGGCGCTCCGACTGCCCTCT
GAGGCCTCCGGACTCCTCTCGTACTTGAACTCACTCCCTCACGGGGAGAGAGACCACACGCAGT
ATTGAGCTGCCTGAGTGGGCGTGGTACCTGCTGTGGGTGCCAGCGCCCCTTCCCCACCTCAGGA
GCGTGAGATGCCAGGTCGCACAGAGGGCAGCAGCAGCGGCCGTCCCGCGGCCTCTGGGCCCCCC
AGTGCCCTGCCCACTCCATCAAGGCCCTATGTGGCCCACCTGGCAGGGGCACAGCCCCGGGAGT
GGGAGCGGGCGCTGGGGCCCTGGGCCCTGACCCAGCTTCCAGCTATGCAAGGTGAGGTCTCTGG
CCCACCCTTCGGACACAGCAGGGAAGCCCTCCCGCCAAGTCCCCGCCCCACTTGGGGGTGGGCC
AAGGTGCCCCCACAGGTACCCACAAAGCACAGGACCCTGCCACAAGGCAGGTGGACACCATATA
TGCAAACCATGTTAAATATGCAACTTTGGGGACCCCCATGGGGTCTCTCTGTCCCTCCCCCATT
GGGAGCTGGGCCCCCAGCAGTAGCTGGTCTCAGGCTGCTTGGCCACCACCCTGTCCCTATTCTT
TGGCTTATCACTCCTTCCCCTCCCAGCATGGGGCCTGTTTCTCCCCTGCCCTCTCCTAAGGGCA
ATGCCTGGGCCTTTCTTCCCATTTGCAAGTGTCAGCTCCCAGGGGCTCCCTCCTCCTGCTGGGT
GGCCACTCCCCTCCTTGGCCCTCCAGACACCACTCATAGTCAGCACAGGTTTCTGTATCCTCCC
CAAAACTCCCAGACAGTGCTTCGTGGAGGATCGCACAAACATAGCCTTTTAGTTTCTCCAGACA
GGAAGAAAGCCTCTCACACTTAAACATGCAATGACGTGACACACTTGGAGACATGAGTGCAGAG
CCACTCAGCCGCTCCTGGGCCTCTGCAGCAGATGCCAGTGGACTGGCCTTGCAGGGTGACGACC
ACTAAGAGGAAGACCCCCAACTCCATCTGAGCAGGAGAAGGAGCTTTGAAGTAACCCGAGAGCT
CTCCAGGCCCCACCCAGACCTTTACCCGCTCCCCTTCTTCAAGAAGATCTCCTCCTCTCTGGTC
CAGGAGCCCTAACCCACTGCCTCTGCCTGTCCCCAAGGGCCCGCCTCCGTGTCTCCACAGCACA
ACTCGGGCCCAGGCCTGACACCACTGGAGAGACCCCAGGCCCACTTCTAGCCAGGCCTGTGCCT
TCCTAGTCACTCTAACTCCCAGAGAGAATAAGAATGCATGTAATAGCTATACCAACCGCGCATC
CGGCTTTCACATGCACTGTCTCCCCTCCCTCCACACCCCACTTCTTCACTTCAATTGGCAGCGC
CACATCCAGGCGTCAGCCCCCATTCACTCCAGGAACACTTTCTTATCCCCACCCCTTTGCTCCT
CTTCTGCAAAGCCAATGCAGGTGGCAGGAAGGTGAGGGGTAGTGGACCAATGGCAACCCTCTGT
GGGAACAAGGGGCCGAGGCCACGCTGCCTGCATCTCGTGCTGGGGACCTGCATGCGCCAGCACC
AGGGCTTGGACTGGATCTTACTCAGTCCATGGTGCCCAGCCTCTGCCCCAACATGCCCTCTGCA
TGTGACCGTCATGCCCTGGATGGAGCCACTCCTGGCTCACCCCACCTGCACTGCACTGTCCCCA
GAGAGCCACCCCTCCACCCACTCAGAGACAGCTGTGGAGAGGGCCAGGAGAATGGGATTACCCT
ATGACCAAGGAGACATGGGAAGAAGCCCTCCTTCCTTCCACGATCGAGGTTCCGCCATCAACTC
GGTTCTCGGATATGCAAGTACCTCACTTTGTTAACTTATTAACTTATTGGTTTCATTAAAGTTT
TCAAGAGGA
HUMAN 3′ UTR SEQUENCE FROM ENDOGENOUS KCNQ4
TRANSCIRPT VARIANT 2
(SEQ ID NO: 29)
GGGACTTCTCAGAGGCAGGGCAGCACACGGCCAGCCCCGCGGCCTGGCGCTCCGACTGCCCTCT
GAGGCCTCCGGACTCCTCTCGTACTTGAACTCACTCCCTCACGGGGAGAGAGACCACACGCAGT
ATTGAGCTGCCTGAGTGGGCGTGGTACCTGCTGTGGGTGCCAGCGCCCCTTCCCCACCTCAGGA
GCGTGAGATGCCAGGTCGCACAGAGGGCAGCAGCAGCGGCCGTCCCGCGGCCTCTGGGCCCCCC
AGTGCCCTGCCCACTCCATCAAGGCCCTATGTGGCCCACCTGGCAGGGGCACAGCCCCGGGAGT
GGGAGCGGGCGCTGGGGCCCTGGGCCCTGACCCAGCTTCCAGCTATGCAAGGTGAGGTCTCTGG
CCCACCCTTCGGACACAGCAGGGAAGCCCTCCCGCCAAGTCCCCGCCCCACTTGGGGGTGGGCC
AAGGTGCCCCCACAGGTACCCACAAAGCACAGGACCCTGCCACAAGGCAGGTGGACACCATATA
TGCAAACCATGTTAAATATGCAACTTTGGGGACCCCCATGGGGTCTCTCTGTCCCTCCCCCATT
GGGAGCTGGGCCCCCAGCAGTAGCTGGTCTCAGGCTGCTTGGCCACCACCCTGTCCCTATTCTT
TGGCTTATCACTCCTTCCCCTCCCAGCATGGGGCCTGTTTCTCCCCTGCCCTCTCCTAAGGGCA
ATGCCTGGGCCTTTCTTCCCATTTGCAAGTGTCAGCTCCCAGGGGCTCCCTCCTCCTGCTGGGT
GGCCACTCCCCTCCTTGGCCCTCCAGACACCACTCATAGTCAGCACAGGTTTCTGTATCCTCCC
CAAAACTCCCAGACAGTGCTTCGTGGAGGATCGCACAAACATAGCCTTTTAGTTTCTCCAGACA
GGAAGAAAGCCTCTCACACTTAAACATGCAATGACGTGACACACTTGGAGACATGAGTGCAGAG
CCACTCAGCCGCTCCTGGGCCTCTGCAGCAGATGCCAGTGGACTGGCCTTGCAGGGTGACGACC
ACTAAGAGGAAGACCCCCAACTCCATCTGAGCAGGAGAAGGAGCTTTGAAGTAACCCGAGAGCT
CTCCAGGCCCCACCCAGACCTTTACCCGCTCCCCTTCTTCAAGAAGATCTCCTCCTCTCTGGTC
CAGGAGCCCTAACCCACTGCCTCTGCCTGTCCCCAAGGGCCCGCCTCCGTGTCTCCACAGCACA
ACTCGGGCCCAGGCCTGACACCACTGGAGAGACCCCAGGCCCACTTCTAGCCAGGCCTGTGCCT
TCCTAGTCACTCTAACTCCCAGAGAGAATAAGAATGCATGTAATAGCTATACCAACCGCGCATC
CGGCTTTCACATGCACTGTCTCCCCTCCCTCCACACCCCACTTCTTCACTTCAATTGGCAGCGC
CACATCCAGGCGTCAGCCCCCATTCACTCCAGGAACACTTTCTTATCCCCACCCCTTTGCTCCT
CTTCTGCAAAGCCAATGCAGGTGGCAGGAAGGTGAGGGGTAGTGGACCAATGGCAACCCTCTGT
GGGAACAAGGGGCCGAGGCCACGCTGCCTGCATCTCGTGCTGGGGACCTGCATGCGCCAGCACC
AGGGCTTGGACTGGATCTTACTCAGTCCATGGTGCCCAGCCTCTGCCCCAACATGCCCTCTGCA
TGTGACCGTCATGCCCTGGATGGAGCCACTCCTGGCTCACCCCACCTGCACTGCACTGTCCCCA
GAGAGCCACCCCTCCACCCACTCAGAGACAGCTGTGGAGAGGGCCAGGAGAATGGGATTACCCT
ATGACCAAGGAGACATGGGAAGAAGCCCTCCTTCCTTCCACGATCGAGGTTCCGCCATCAACTC
GGTTCTCGGATATGCAAGTACCTCACTTTGTTAACTTATTAACTTATTGGTTTCATTAAAGTTT
TCAAGAGGA
EXEMPLARY HUMAN 3′ UTR SEQUENCE FROM ENDOGENOUS
KCNQ4 TRANSCIRPT VARIANT X1
(SEQ ID NO: 30)
GGGACTTCTCAGAGGCAGGGCAGCACACGGCCAGCCCCGCGGCCTGGCGCTCCGACTGCCCTCT
GAGGCCTCCGGACTCCTCTCGTACTTGAACTCACTCCCTCACGGGGAGAGAGACCACACGCAGT
ATTGAGCTGCCTGAGTGGGCGTGGTACCTGCTGTGGGTGCCAGCGCCCCTTCCCCACCTCAGGA
GCGTGAGATGCCAGGTCGCACAGAGGGCAGCAGCAGCGGCCGTCCCGCGGCCTCTGGGCCCCCC
AGTGCCCTGCCCACTCCATCAAGGCCCTATGTGGCCCACCTGGCAGGGGCACAGCCCCGGGAGT
GGGAGCGGGCGCTGGGGCCCTGGGCCCTGACCCAGCTTCCAGCTATGCAAGGTGAGGTCTCTGG
CCCACCCTTCGGACACAGCAGGGAAGCCCTCCCGCCAAGTCCCCGCCCCACTTGGGGGTGGGCC
AAGGTGCCCCCACAGGTACCCACAAAGCACAGGACCCTGCCACAAGGCAGGTGGACACCATATA
TGCAAACCATGTTAAATATGCAACTTTGGGGACCCCCATGGGGTCTCTCTGTCCCTCCCCCATT
GGGAGCTGGGCCCCCAGCAGTAGCTGGTCTCAGGCTGCTTGGCCACCACCCTGTCCCTATTCTT
TGGCTTATCACTCCTTCCCCTCCCAGCATGGGGCCTGTTTCTCCCCTGCCCTCTCCTAAGGGCA
ATGCCTGGGCCTTTCTTCCCATTTGCAAGTGTCAGCTCCCAGGGGCTCCCTCCTCCTGCTGGGT
GGCCACTCCCCTCCTTGGCCCTCCAGACACCACTCATAGTCAGCACAGGTTTCTGTATCCTCCC
CAAAACTCCCAGACAGTGCTTCGTGGAGGATCGCACAAACATAGCCTTTTAGTTTCTCCAGACA
GGAAGAAAGCCTCTCACACTTAAACATGCAATGACGTGACACACTTGGAGACATGAGTGCAGAG
CCACTCAGCCGCTCCTGGGCCTCTGCAGCAGATGCCAGTGGACTGGCCTTGCAGGGTGACGACC
ACTAAGAGGAAGACCCCCAACTCCATCTGAGCAGGAGAAGGAGCTTTGAAGTAACCCGAGAGCT
CTCCAGGCCCCACCCAGACCTTTACCCGCTCCCCTTCTTCAAGAAGATCTCCTCCTCTCTGGTC
CAGGAGCCCTAACCCACTGCCTCTGCCTGTCCCCAAGGGCCCGCCTCCGTGTCTCCACAGCACA
ACTCGGGCCCAGGCCTGACACCACTGGAGAGACCCCAGGCCCACTTCTAGCCAGGCCTGTGCCT
TCCTAGTCACTCTAACTCCCAGAGAGAATAAGAATGCATGTAATAGCTATACCAACCGCGCATC
CGGCTTTCACATGCACTGTCTCCCCTCCCTCCACACCCCACTTCTTCACTTCAATTGGCAGCGC
CACATCCAGGCGTCAGCCCCCATTCACTCCAGGAACACTTTCTTATCCCCACCCCTTTGCTCCT
CTTCTGCAAAGCCAATGCAGGTGGCAGGAAGGTGAGGGGTAGTGGACCAATGGCAACCCTCTGT
GGGAACAAGGGGCCGAGGCCACGCTGCCTGCATCTCGTGCTGGGGACCTGCATGCGCCAGCACC
AGGGCTTGGACTGGATCTTACTCAGTCCATGGTGCCCAGCCTCTGCCCCAACATGCCCTCTGCA
TGTGACCGTCATGCCCTGGATGGAGCCACTCCTGGCTCACCCCACCTGCACTGCACTGTCCCCA
GAGAGCCACCCCTCCACCCACTCAGAGACAGCTGTGGAGAGGGCCAGGAGAATGGGATTACCCT
ATGACCAAGGAGACATGGGAAGAAGCCCTCCTTCCTTCCACGATCGAGGTTCCGCCATCAACTC
GGTTCTCGGATATGCAAGTACCTCACTTTGTTAACTTATTAACTTATTGGTTTCATTAAAGTTT
TCAAGAGGAGGTGA

viii. Kozak Sequences

[0235] In some embodiments, a construct of the present disclosure comprises one or more Kozak sequences. In some embodiments, natural 5′ UTRs include a sequence that plays a role in translation initiation. For example, in some embodiments, they harbor signatures like Kozak sequences, which are commonly known to be involved in a process by which a ribosome initiates translation of many genes. Kozak sequences generally have a consensus sequence CCR(A/G)CCAUGG, where R is a purine (A or G) three bases upstream of a start codon (AUG), which is followed by another “G”. In some embodiments, Kozak sequences may be included in synthetic or additional sequence elements, such as cloning sites.

ix. Internal Ribosome Entry Site (IRES)

[0236] In some embodiments, a construct of the present disclosure comprises one or more polynucleotide internal ribosome entry site (IRES). For example, in some embodiments, a construct of the present disclosure (e.g., a construct encoding a KCNQ4 gene product (e.g., human Kv7.4 protein, etc.) may include an IRES. In some embodiments, an IRES sequence is used to produce more than one polypeptide from a single gene transcript. In some embodiments, an IRES forms a complex secondary structure that allows translation initiation to occur from any position with an mRNA immediately downstream from where an IRES is located (see, e.g., Pelletier and Sonenberg, Mol. Cell. Biol. 8(3):1103-1112, 1988, which is incorporated in its entirety herein by reference).

[0237] There are several IRES sequences known to those skilled in the art, including those from, e.g., foot and mouth disease virus (FMDV), encephalomyocarditis virus (EMCV), human rhinovirus (HRV), cricket paralysis virus, human immunodeficiency virus (HIV), hepatitis A virus (HAV), hepatitis C virus (HCV), and poliovirus (PV). See e.g., Alberts, Molecular Biology of the Cell, Garland Science, 2002; and Hellen et al., Genes Dev. 15(13):1593-612, 2001, each of which is incorporated in its entirety herein by reference.

[0238] In some embodiments, an IRES sequence incorporated into a construct that encodes a KCNQ4 gene product (e.g., human Kv7.4 protein, etc.) or inhibitory nucleic acid (e.g., miRNA, etc.) thereof is foot and mouth disease virus (FMDV). Foot and Mouth Disease Virus 2A sequence is a small peptide (approximately 18 amino acids in length) that has been shown to mediate cleavage of polyproteins (Ryan, M D et al., EMBO 4:928-933, 1994; Mattion et al., J. Virology 70:8124-8127, 1996; Furler et al., Gene Therapy 8:864-873, 2001; and Halpin et al., Plant Journal 4:453-459, 1999, each of which is incorporated in its entirety herein by reference). Cleavage activity of the 2A sequence has previously been demonstrated in artificial systems including plasmids and gene therapy constructs (AAV and retroviruses) (Ryan et al., EMBO 4:928-933, 1994; Mattion et al., J. Virology 70:8124-8127, 1996; Furler et al., Gene Therapy 8:864-873, 2001; and Halpin et al., Plant Journal 4:453-459, 1999; de Felipe et al., Gene Therapy 6:198-208, 1999; de Felipe et al., Human Gene Therapy 11:1921-1931, 2000; and Klump et al., Gene Therapy 8:811-817, 2001, each of which is incorporated in its entirety herein by reference).

x. tRNA Sequences

[0239] In some embodiments, a construct of the present disclosure comprises a tRNA sequence. For instance, in some embodiments, a tRNA sequence may be used to facilitate a multiplex gRNA or shRNA/siRNA strategy. For example, in some embodiments, a tRNA may be included in a construct comprising at least 2, 3, 4, 5, 6, 7, 8, 9, 10 gRNAs; at least 2, 3, 4, 5, 6, 7, 8, 9, 10 shRNA/siRNAs etc. (see, e.g., PNAS 2015, 112 (11) 3570-3575, which is incorporated in its entirety herein by reference).

xi. Other Intronic Sequences

[0240] In some embodiments a construct of the present disclosure includes one or more intronic sequences, which intronic sequences do not comprise a UTR sequence. In some embodiments, non-UTR sequences may be incorporated into 5′ or 3′ UTRs. In some embodiments, introns or portions of intron sequences may be incorporated into t flanking regions of a polynucleotide in any constructs, compositions, kits, and methods provided herein. Incorporation of intronic sequences may increase protein production as well as mRNA levels. An intron can be an intron from a KCNQ4 gene or can be an intron from a heterologous gene, e.g., a hybrid adenovirus/mouse immunoglobulin intron (Yew et al., Human Gene Ter. 8(5):575-584, 1997, which is incorporated in its entirety herein by reference), an SV40 intron (Ostedgaard et al., Proc. Natl. Acad. Sci. U.S.A. 102(8):2952-2957, 2005, which is incorporated in its entirety herein by reference), an MVM intron (Wu et al., Mol. Ther. 16(2):280-289, 2008, which is incorporated in its entirety herein by reference), a factor IX truncated intron 1 (Wu et al., Mol. Ther. 16(2):280-289, 2008; Kurachi et al., J. Biol. Chem. 270(10):5276-5281, 1995, each of which is incorporated in its entirety herein by reference), a chimeric J-globulin splice donor/immunoglobulin heavy chain splice acceptor intron (Wu et al., Mol. Ther. 16(2):280-289, 2008; Choi et al., Mol. Brain 7:17, 2014, each of which is incorporated in its entirety herein by reference), SV40 late splice donor/splice acceptor intron (19S/16S) (Yew et al., Human Gene Ther. 8(5):575-584, 1997, which is incorporated in its entirety herein by reference), hybrid adenovirus spice donor/IgG splice acceptor (Choi et al., Mol. Brain 7:17, 1991; Huang and Gorman, Mol. Cell Biol. 10(4):1805-1810, 1990, each of which is incorporated in its entirety herein by reference). In some embodiments, an intronic sequence is at least 85%, 90%, 95%, 98% or 99% identical to any intronic sequence disclosed herein.

[0241] By way of non-limiting example, an intronic sequence in accordance with the present disclosure may be or comprise the following:

SD Intron
(SEQ ID NO: 31)
GTAAGTATCAAGGTTACAAGACAGGTTTAAGGAGA
CCAATAGAAACTGGGCTTGTCGAGACAGAGAAGAC
TCTTGCGTTTCT
SA Intron
(SEQ ID NO: 32)
GATAGGCACCTATTGGTCTTACTGACATCCACTTT
GCCTTTCTCTCCACAG

xii. Polyadenylation Sequences

[0242] In some embodiments, a construct of the present disclosure may comprise at least one poly(A) sequence. Most nascent eukaryotic mRNA possesses a poly(A) tail at its 3′ end which is added during a complex process that includes cleavage of a primary transcript and a coupled polyadenylation reaction (see, e.g., Proudfoot et al., Cell 108:501-512, 2002). A poly(A) tail confers mRNA stability and transferability (see, e.g., Molecular Biology of the Cell, Third Edition by B. Alberts et al., Garland Publishing, 1994). In some embodiments, a poly(A) sequence is positioned 3′ to a nucleic acid sequence encoding a KCNQ4 gene product or inhibitory nucleic acid molecule.

[0243] In some embodiments, polyadenylation refers to a covalent linkage of a polyadenylyl moiety, or its modified variant, to a messenger RNA molecule. In eukaryotic organisms, most messenger RNA (mRNA) molecules are polyadenylated at a 3′ end. In some embodiments, a 3′ poly(A) tail is a long sequence of adenine nucleotides (often several hundred) added to pre-mRNA through enzymatic action, polyadenylate polymerase. In higher eukaryotes, a poly(A) tail is added onto transcripts that contain a specific sequence, a polyadenylation signal. In some embodiments, a poly(A) tail and a protein bound to it aid in protecting mRNA from degradation by exonucleases. As will be understood to those of skill in the art, polyadenylation is also important for transcription termination, export of mRNA from a cell's nucleus, and translation. Polyadenylation occurs in a cell nucleus immediately after transcription of DNA into RNA, but additionally can also occur later in the cytoplasm. After transcription has been terminated, an mRNA chain is cleaved through action of an endonuclease complex associated with RNA polymerase. A cleavage site is usually characterized by the presence of a base sequence AAUAAA near a given cleavage site. After an mRNA has been cleaved, adenosine residues are added to the free 3′ end at the cleavage site.

[0244] In some embodiments, a poly(A) signal sequence is a sequence that triggers endonuclease cleavage of an mRNA and addition of a series of adenosines to the3′ end of a cleaved mRNA. A “poly(A)” portion refers to a series of adenosines attached by polyadenylation to an mRNA. In some embodiments of for the present disclosure, such as, e.g., transient expression, a polyA is between 50 and 5000 (SEQ ID NO: 93), preferably greater than 64, more preferably greater than 100, most preferably greater than 300 or 400. Poly(A) sequences can be modified chemically or enzymatically to modulate mRNA functionality such as localization, stability or efficiency of translation.

[0245] There are several poly(A) signal sequences that can be used, including those derived from bovine growth hormone (bgh) (Woychik et al., Proc. Natl. Acad. Sci. U.S.A. 81(13):3944-3948, 1984; U.S. Pat. No. 5,122,458; Yew et al., Human Gene Ther. 8(5):575-584, 1997; Xu et al., Human Gene Ther. 12(5):563-573, 2001; Xu et al., Gene Ther. 8:1323-1332, 2001; Wu et al., Mol. Ther. 16(2):280-289, 2008; Gray et al., Human Gene Ther. 22:1143-1153, 2011; Choi et al., Mol. Brain 7:17, 2014, each of which is incorporated in its entirety herein by reference), mouse-β-globin, mouse-α-globin (Orkin et al., EMBO J. 4(2):453-456, 1985; Thein et al., Blood 71(2):313-319, 1988, each which is incorporated in its entirety herein by reference), human collagen, polyoma virus (Batt et al., Mol. Cell Biol. 15(9):4783-4790, 1995, each of which is incorporated in its entirety herein by reference), Herpes simplex virus thymidine kinase gene (HSV TK), IgG heavy-chain gene polyadenylation signal (US 2006/0040354, which is incorporated in its entirety herein by reference), human growth hormone (hGH) (Szymanski et al., Mol. Therapy 15(7):1340-1347, 2007; Ostegaard et al., Proc. Natl. Acad. Sci. U.S.A. 102(8):2952-2957, 2005, each of which is incorporated in its entirety herein by reference), synthetic polyA (Levitt et al., Genes Dev. 3(7):1019-1025, 1989; Yew et al., Human Gene Ther. 8(5):575-584, 1997; Ostegaard et al., Proc. Natl. Acad. Sci. U.S.A. 102(8):2952-2957, 2005; Choi et al., Mol. Brain 7:17, 2014, each of which is incorporated in its entirety herein by reference), HIV-1 upstream poly(A) enhancer (Schambach et al., Mol. Ther. 15(6):1167-1173, 2007, each of which is incorporated in its entirety herein by reference), adenovirus (L3) upstream poly(A) enhancer (Schambach et al., Mol. Ther. 15(6):1167-1173, 2007, which is incorporated in its entirety herein by reference), hTHGB upstream poly(A) enhancer (Schambach et al., Mol. Ther. 15(6):1167-1173, 2007), hC2 upstream poly(A) enhancer (Schambach et al., Mol. Ther. 15(6):1167-1173, 2007), the group consisting of SV40 poly(A) signal sequence, such as the SV40 late and early poly(A) signal sequence (Schek et al., Mol. Cell Biol. 12(12):5386-5393, 1992; Choi et al., Mol. Brain 7:17, 2014; Schambach et al., Mol. Ther. 15(6):1167-1173, 2007, each of which is incorporated in its entirety herein by reference). Non-limiting examples of poly(A) signal sequences include SEQ ID NOs: 33, 34, or 35.

[0246] In some embodiments, a poly(A) signal sequence can be the sequence AATAAA. In some embodiments, an AATAAA sequence may be substituted with other hexanucleotide sequences with homology to AATAAA which are capable of signaling polyadenylation, including ATTAAA, AGTAAA, CATAAA, TATAAA, GATAAA, ACTAAA, AATATA, AAGAAA, AATAAT, AAAAAA, AATGAA, AATCAA, AACAAA, AATCAA, AATAAC, AATAGA, AATTAA, or AATAAG (see, e.g., WO 06/12414, which is incorporated in its entirety herein by reference).

[0247] In some embodiments, a poly(A) signal sequence can be a synthetic polyadenylation site (see, e.g., the pCl-neo expression construct of Promega which is based on Levitt el al, Genes Dev. 3(7):1019-1025, 1989, which is incorporated in its entirety herein by reference). In some embodiments, a poly(A) signal sequence is a polyadenylation signal of soluble neuropilin-1 (sNRP) (AAATAAAATACGAAATG (SEQ ID NO: 94)) (see, e.g., WO 05/073384, which is incorporated in its entirety herein by reference). In some embodiments, a poly(A) sequence is a bovine growth hormone poly(A) sequence. In some such embodiments, a bGH poly(A) sequence is or comprises SEQ ID NO: 36. In some embodiments, a construct or construct of the present disclosure comprises a bovine growth hormone polyA sequence represented by SEQ ID NO: 36. Additional examples of poly(A) signal sequences are known in the art.

[0248] In some embodiments, a polyA sequence is at least 85%, 90%, 95%, 98% or 99% identical to the polyA sequence of SEQ ID NOs: 33, 34, 35, or 36. In some embodiments, a polyadenylation sequence is at least 85%, 90%, 95%, 98% or 99% identical to any polyadenylation sequence disclosed herein.

[0249] By way of non-limiting example, a polyadenylation sequence may be or comprise:

Poly(A) signal sequence
(SEQ ID NO: 33)
GCTGATCAGCCTCGACTGTGCCTTCTAGTTGCCAG
CCATCTGTTGTTTGCCCCTCCCCCGTGCCTTCCTT
GACCCTGGAAGGTGCCACTCCCACTGTCCTTTCCT
AATAAAATGAGGAAATTGCATCGCATTGTCTGAGT
AGGTGTCATTCTATTCTGGGGGGTGGGGTGGGGCA
GGACAGCAAGGGGGAGGATTGGGAAGACAATAGCA
GGCATGCTGGGGATGCGGTGGGCTCTATGG
Poly(A) signal sequence
(SEQ ID NO: 34)
AATAAAATATCTTTATTTTCATTACATCTGTGTGT
TGGTTTTTTGTGTG
Poly(A) signal sequence
(SEQ ID NO: 35)
CGGCAATAAAAAGACAGAATAAAACGCACGGTGTT
GGGTCGTTTGTTC
bGHpA
(SEQ ID NO: 36)
CTGTGCCTTCTAGTTGCCAGCCATCTGTTGTTTGC
CCCTCCCCCGTGCCTTCCTTGACCCTGGAAGGTGC
CACTCCCACTGTCCTTTCCTAATAAAATGAGGAAA
TTGCATCGCATTGTCTGAGTAGGTGTCATTCTATT
CTGGGGGGTGGGGTGGGGCAGGACAGCAAGGGGGA
GGATTGGGAAGACAATAGCAGGCATGCTGGGGATG
CGGTGGGCTCTATGG

xiii. Other Regulatory Sequences

[0250] In some embodiments, a construct of the present disclosure can include one or more additional regulatory elements, e.g., a woodchuck hepatitis virus posttranscriptional regulatory element (WPRE), e.g., SEQ ID NO: 37. In some embodiments, a WPRE sequence is at least 85%, 90%, 95%, 98% or 99% identical to the WPRE sequence represented by SEQ ID NO: 37. In some embodiments, a regulatory element impacts expression of, e.g., a coding sequence of a construct (e.g., a sequence encoding a KCNQ4 gene product). In some embodiments, a regulatory element is a WPRE. In some such embodiments, such a regulatory element enhances or strengthens expression of one or more elements of a construct (e.g., a KCNQ4 gene product). By way of non-limiting example, a regulatory sequence may be or comprise the following:

WPRE element
(SEQ ID NO: 37)
AATCAACCTCTGGATTACAAAATTTGTGAAAGATT
GACTGGTATTCTTAACTATGTTGCTCCTTTTACGC
TATGTGGATACGCTGCTTTAATGCCTTTGTATCAT
GCTATTGCTTCCCGTATGGCTTTCATTTTCTCCTC
CTTGTATAAATCCTGGTTGCTGTCTCTTTATGAGG
AGTTGTGGCCCGTTGTCAGGCAACGTGGCGTGGTG
TGCACTGTGTTTGCTGACGCAACCCCCACTGGTTG
GGGCATTGCCACCACCTGTCAGCTCCTTTCCGGGA
CTTTCGCTTTCCCCCTCCCTATTGCCACGGCGGAA
CTCATCGCCGCCTGCCTTGCCCGCTGCTGGACAGG
GGCTCGGCTGTTGGGCACTGACAATTCCGTGGTGT
TGTCGGGGAAGCTGACGTCCTTTCCATGGCTGCTC
GCCTGTGTTGCCACCTGGATTCTGCGCGGGACGTC
CTTCTGCTACGTCCCTTCGGCCCTCAATCCAGCGG
ACCTTCCTTCCCGCGGCCTGCTGCCGGCTCTGCGG
CCTCTTCCGCGTCTTCGCCTTCGCCCTCAGACGAG
TCGGATCTCCCTTTGGGCCGCCTCCCCGC

xiv. Destabilization Domains

[0251] Any compositions (e.g., constructs) provided herein can optionally include a sequence that is or encodes a destabilization domain. In some embodiments, a destabilization domain is an amino acid sequence that decreases in vivo or in vitro half-life of a protein that includes a destabilization domain, e.g., as compared to the same protein lacking a stabilization domain. For example, in some embodiments, a destabilization domain may result in targeting of a protein that includes a destabilization domain for proteosomal degradation. Non-limiting examples of destabilization domains include a destabilizing domain of E. coli dihydrofolate reductase (DHFR) (Iwamoto et al. (2010) Chem. Biol. 17(9): 981-998, which is incorporated in its entirety herein by reference) and FK-506 binding protein (FKBP) (Wenlin et al. (2015) PLoS One 10(12): e0145783, which is incorporated in its entirety herein by reference). SEQ ID NO: 38 is an exemplary amino acid sequence of a DHFR destabilization domain. In some embodiments, a degradation sequence is at least 85%, 90%, 95%, 98% or 99% identical to the degradation sequence of SEQ ID NO: 38. Additional examples of destabilization domains are known in the art.

[0252] In some embodiments, any constructs provided herein can optionally include a degradation sequence, e.g., a CL1 degradation sequence of SEQ ID NO: 39. In some embodiments, a CL1 degradation sequence is at least 85%, 90%, 95%, 98% or 99% identical to the degradation sequence of SEQ ID NO: 39.

DHFR destabilization domain
(SEQ ID NO: 38)
ISLIAALAVDHVIGMETVMPWNLPADLAWFKRNTL
NKPVIMGRHTWESIGRPLPGRKNIILSSQPSTDDR
VTWVKSVDEAIAACGDVPEIMVIGGGRVYEQFLPK
AQKLYLTHIDAEVEGDTHFPDYEPDDWESVFSEFH
DADAQNSHSYCFEILERR
CL1
(SEQ ID NO: 39)
GCCTGCAAGAACTGGTTCAGCAGCCTGAGCCACTT
CGTGATCCACCTG

xv. Degron Domains

[0253] In some embodiments, any constructs provided herein can optionally include a C2H2 Zinc Finger “controllable” degron sequence and/or controllable destabilizing domain for a protein (e.g., a Cas9 protein). SEQ ID NO: 40 is an exemplary amino acid sequence of a C2H2 zinc finger degron domain.

C2H2 Zinc Finger Degron
(SEQ ID NO: 40)
FQCNQCGASFTQKGNLLRHIKLH

xvi. Reporter Sequences or Elements

[0254] Any constructs provided herein can optionally include a sequence encoding a reporter protein (“a reporter sequence”). For example, in some embodiments, a reporter sequence may be a FLAG, an eGFP, an mScarlet, a luciferase or any variant thereof. In some embodiments, a reporter sequence is visibly detectable without intervention. In some embodiments, a reporter element may be detected using a combination of fluorescent, histochemical, and/or transcript or protein analyses. Non-limiting examples of reporter sequences are described herein. Additional examples of reporter sequences are known in the art. In some embodiments, reporter sequence can be used to verify tissue-specific targeting capabilities and tissue-specific promoter regulatory activity of any constructs described herein.

[0255] In some embodiments, a reporter sequence is a FLAG tag (e.g., a 3xFLAG tag). In some embodiments, constructs or constructs of the present disclosure may comprise a 3×FLAG sequence. In some embodiments, presence of a reporter (e.g., of a construct carrying a FLAG tag in a mammalian cell (e.g., an inner ear cell, e.g., a cochlear hair or supporting cell) is detected by protein binding or detection assays (e.g., Western blots, immunohistochemistry, radioimmunoassay (RIA), mass spectrometry). An exemplary 3xFLAG tag sequence is provided as SEQ ID NO: 41.

3xFLAG tag sequence
(SEQ ID NO: 41)
GGATCCCGGGCTGACTACAAAGACCATGACGGTGA
TTATAAAGATCATGACATCGACTACAAGGATGAGG
ATGAGAAG

xvii. Additional Sequences

[0256] In some embodiments, constructs or constructs of the present disclosure may comprise a T2A element or sequence. In some embodiments, constructs of the present disclosure may include one or more cloning sites. In some such embodiments, cloning sites may not be fully removed prior to manufacturing for administration to a subject.

xviii. Single Construct Systems

[0257] In some embodiments, the present disclosure provides compositions which may include a single construct system. In some such embodiments, a single construct may deliver an inhibitory nucleic acid and/or a nucleic acid that encodes a functional (e.g., wild-type or otherwise functional, e.g., codon optimized) copy of KCNQ4. In some embodiments, a construct system is or comprises an AAV construct. In some embodiments described herein, a single AAV construct is capable of expressing a full-length KCNQ4 messenger RNA in a target cell. In some embodiments of any methods described herein, a single construct (e.g., any constructs described herein) that includes a sequence encoding a functional KCNQ4 protein (e.g., any construct that generates functional KCNQ4 protein) can be administered to a subject.

xix. Multiple Construct Systems

[0258] In some embodiments, a construct system of the present disclosure may comprise more than one construct (e.g., a dual or triple construct, e.g., for delivery of various components of a system provided by the present disclosure (e.g., a gene editing system and a transgene expression system). For example, in some embodiments, a dual construct may include two separate AAV constructs, each comprising a different component or construct (e.g., a CRISPR/Cas9 component and a replacement KCNQ4 component). In some embodiments, one construct (e.g., a first AAV construct) may comprise an inhibitory nucleic acid (e.g., an siRNA, a microRNA) and a second construct (e.g., a second AAV construct) may comprise a sequence encoding a functional KCNQ4 (e.g., a wild-type KCNQ4, e.g., a codon-optimized KCNQ4). In some embodiments, a dual AAV construct may include two separate AAV constructs, each including different or the same regulatory regions or promoters. In some embodiments, each construct comprises regulatory elements and promoters specific to a target, e.g., an ear cell, e.g., a hair cell, e.g., an outer hair cell.

[0259] In some embodiments, the present disclosure provides technologies that comprise multiple constructs. In some such embodiments, constructs may be all of a single construct type (e.g., AAV), or more than one type (e.g., AAV, adeno, etc.). In some such embodiments that comprise multiple constructs, each construct comprises a component of a system provided by the present disclosure, e.g., one construct comprises an inhibitory nucleic acid (e.g., a KCNQ4 miRNA) and another construct comprises a sequence encoding a functional KCNQ4 (e.g., a wild-type KCNQ4 gene that encodes a functional Kv7.4 protein, e.g., a codon-optimized KCNQ4 gene that encodes a functional Kv7.4 protein, etc.).

[0260] In some embodiments comprising multiple AAV constructs, AAV constructs may be of the same or different types, e.g., the same or different serotype.

[0261] In some embodiments, the present disclosure provides compositions comprising one or more constructs to deliver a therapeutic gene product or portion thereof to a subject in need thereof. For example, in some embodiments, a KCNQ4 gene is changed (e.g., via substitution, deletion, addition) in a genome of a subject. In some such embodiments, one or more constructs may be administered to a subject. In some such embodiments, one or more constructs may be administered to either (i) knockdown a variant (e.g., with a substitution, addition, or deletion) or nonfunctional (e.g., loss-of-function) KCNQ4 and/or (ii) provide a functional KCNQ4

xx. Exemplary Constructs

[0262] In some embodiments, the present disclosure provides technologies (e.g., compositions, systems, particles, comprising AAV-based constructs. In some embodiments, such technologies comprise a single construct. In some embodiments, such technologies comprise multiple constructs. In some embodiments, the present disclosure provides compositions or systems comprising multiple AAV particles each comprised of a single construct. In some embodiments, a single construct may deliver a polynucleotide that encodes a functional (e.g., wild type or otherwise functional, e.g., codon optimized) copy of a KCNQ4 gene. In some embodiments, a construct is or comprises an rAAV construct. In some embodiments described herein, a single rAAV construct is capable of expressing a full-length KCNQ4 messenger RNA or a characteristic protein thereof in a target cell (e.g., an inner ear cell). In some embodiments, a single construct (e.g., any of the constructs described herein) can include a sequence encoding a functional KCNQ4 protein (e.g., any construct that generates functional KCNQ4 protein). In some embodiments, a single construct (e.g., any of the constructs described herein) can include a sequence encoding a functional KCNQ4 protein (e.g., any construct that generates functional KCNQ4 protein) and optionally additional polypeptide sequences (e.g., regulatory sequences, and/or reporter sequences). In some embodiments, a single construct may deliver a polynucleotide that encodes a functional Cas9 protein. In some embodiments, a single construct may deliver a polynucleotide that encodes catalytically dead Cas9 protein. In some embodiments, a single construct may deliver a polynucleotide that encodes any number of miRNA, siRNA, shRNA, sgRNA, and/or associated regulatory regions.

[0263] In some embodiments, a single construct composition or system may comprise any or all of the exemplary construct components described herein. In some embodiments, an exemplary single construct is represented by SEQ ID NO: 172-291. In some embodiments, an exemplary single construct is at least 85%, 90%, 95%, 98% or 99% identical to the sequences represented by SEQ ID NO: 172-291. One skilled in the art would recognize that constructs may undergo additional modifications including codon-optimization, introduction of novel but functionally equivalent (e.g., silent mutations), addition of reporter sequences, and/or other routine modification.

### Exemplary Construct Embodiments

[0264] Thirty (30) miRNA Construct Sequences

[0265] In one embodiment, an exemplary construct comprises: a 5′ ITR exemplified by SEQ ID NO: 19, optionally a cloning site exemplified by SEQ ID NO: 155, a CMV enhancer exemplified by SEQ ID NO: 22, a CBA promoter exemplified by SEQ ID NO: 101, a chimeric intron exemplified by SEQ ID NO: 102 with a microRNA backbone and KCNQ4 targeting sequence exemplified by SEQ ID NO: 104 engineered into the chimeric intron, optionally a cloning site exemplified by SEQ ID NO: 156, an eGFP coding region exemplified by SEQ ID NO: 103, optionally a cloning site exemplified by SEQ ID NO: 157, a microRNA backbone and KCNQ4 targeting sequence exemplified by SEQ ID NO: 104, optionally a cloning site exemplified by SEQ ID NO: 158, a polyA site exemplified by SEQ ID NO: 36, optionally a cloning site exemplified by SEQ ID NO: 159, and a 3′ ITR exemplified by SEQ ID NO: 20.

[0266] In one embodiment, an exemplary construct comprises: a 5′ ITR exemplified by SEQ ID NO: 19, optionally a cloning site exemplified by SEQ ID NO: 155, a CMV enhancer exemplified by SEQ ID NO: 22, a CBA promoter exemplified by SEQ ID NO: 101, a chimeric intron exemplified by SEQ ID NO: 102 with a microRNA backbone and KCNQ4 targeting sequence exemplified by SEQ ID NO: 105 engineered into the chimeric intron, optionally a cloning site exemplified by SEQ ID NO: 156, an eGFP coding region exemplified by SEQ ID NO: 103, optionally a cloning site exemplified by SEQ ID NO: 157, a microRNA backbone and KCNQ4 targeting sequence exemplified by SEQ ID NO: 105, optionally a cloning site exemplified by SEQ ID NO: 158, a polyA site exemplified by SEQ ID NO: 36, optionally a cloning site exemplified by SEQ ID NO: 159, and a 3′ ITR exemplified by SEQ ID NO: 20.

[0267] In one embodiment, an exemplary construct comprises: a 5′ ITR exemplified by SEQ ID NO: 19, optionally a cloning site exemplified by SEQ ID NO: 155, a CMV enhancer exemplified by SEQ ID NO: 22, a CBA promoter exemplified by SEQ ID NO: 101, a chimeric intron exemplified by SEQ ID NO: 102 with a microRNA backbone and KCNQ4 targeting sequence exemplified by SEQ ID NO: 106 engineered into the chimeric intron, optionally a cloning site exemplified by SEQ ID NO: 156, an eGFP coding region exemplified by SEQ ID NO: 103, optionally a cloning site exemplified by SEQ ID NO: 157, a microRNA backbone and KCNQ4 targeting sequence exemplified by SEQ ID NO: 106, optionally a cloning site exemplified by SEQ ID NO: 158, a polyA site exemplified by SEQ ID NO: 36, optionally a cloning site exemplified by SEQ ID NO: 159, and a 3′ ITR exemplified by SEQ ID NO: 20.

[0268] In one embodiment, an exemplary construct comprises: a 5′ ITR exemplified by SEQ ID NO: 19, optionally a cloning site exemplified by SEQ ID NO: 155, a CMV enhancer exemplified by SEQ ID NO: 22, a CBA promoter exemplified by SEQ ID NO: 101, a chimeric intron exemplified by SEQ ID NO: 102 with a microRNA backbone and KCNQ4 targeting sequence exemplified by SEQ ID NO: 104 engineered into the chimeric intron, optionally a cloning site exemplified by SEQ ID NO: 156, an eGFP coding region exemplified by SEQ ID NO: 103, optionally a cloning site exemplified by SEQ ID NO: 157, a microRNA backbone and KCNQ4 targeting sequence exemplified by SEQ ID NO: 107, optionally a cloning site exemplified by SEQ ID NO: 158, a polyA site exemplified by SEQ ID NO: 36, optionally a cloning site exemplified by SEQ ID NO: 159, and a 3′ ITR exemplified by SEQ ID NO: 20.

[0269] In one embodiment, an exemplary construct comprises: a 5′ ITR exemplified by SEQ ID NO: 19, optionally a cloning site exemplified by SEQ ID NO: 155, a CMV enhancer exemplified by SEQ ID NO: 22, a CBA promoter exemplified by SEQ ID NO: 101, a chimeric intron exemplified by SEQ ID NO: 102 with a microRNA backbone and KCNQ4 targeting sequence exemplified by SEQ ID NO: 105 engineered into the chimeric intron, optionally a cloning site exemplified by SEQ ID NO: 156, an eGFP coding region exemplified by SEQ ID NO: 103, optionally a cloning site exemplified by SEQ ID NO: 157, a microRNA backbone and KCNQ4 targeting sequence exemplified by SEQ ID NO: 108, optionally a cloning site exemplified by SEQ ID NO: 158, a polyA site exemplified by SEQ ID NO: 36, optionally a cloning site exemplified by SEQ ID NO: 159, and a 3′ ITR exemplified by SEQ ID NO: 20.

[0270] In one embodiment, an exemplary construct comprises: a 5′ ITR exemplified by SEQ ID NO: 19, optionally a cloning site exemplified by SEQ ID NO: 155, a CMV enhancer exemplified by SEQ ID NO: 22, a CBA promoter exemplified by SEQ ID NO: 101, a chimeric intron exemplified by SEQ ID NO: 106 with a microRNA backbone and KCNQ4 targeting sequence exemplified by SEQ ID NO: 104 engineered into the chimeric intron, optionally a cloning site exemplified by SEQ ID NO: 156, an eGFP coding region exemplified by SEQ ID NO: 103, optionally a cloning site exemplified by SEQ ID NO: 157, a microRNA backbone and KCNQ4 targeting sequence exemplified by SEQ ID NO: 109, optionally a cloning site exemplified by SEQ ID NO: 158, a polyA site exemplified by SEQ ID NO: 36, optionally a cloning site exemplified by SEQ ID NO: 159, and a 3′ ITR exemplified by SEQ ID NO: 20.

[0271] In one embodiment, an exemplary construct comprises: a 5′ ITR exemplified by SEQ ID NO: 19, optionally a cloning site exemplified by SEQ ID NO: 155, a CMV enhancer exemplified by SEQ ID NO: 22, a CBA promoter exemplified by SEQ ID NO: 101, a chimeric intron exemplified by SEQ ID NO: 102 with a microRNA backbone and KCNQ4 targeting sequence exemplified by SEQ ID NO: 104 engineered into the chimeric intron, optionally a cloning site exemplified by SEQ ID NO: 156, an eGFP coding region exemplified by SEQ ID NO: 103, optionally a cloning site exemplified by SEQ ID NO: 157, a microRNA backbone and KCNQ4 targeting sequence exemplified by SEQ ID NO: 110, optionally a cloning site exemplified by SEQ ID NO: 158, a polyA site exemplified by SEQ ID NO: 36, optionally a cloning site exemplified by SEQ ID NO: 159, and a 3′ ITR exemplified by SEQ ID NO: 20.

[0272] In one embodiment, an exemplary construct comprises: a 5′ ITR exemplified by SEQ ID NO: 19, optionally a cloning site exemplified by SEQ ID NO: 155, a CMV enhancer exemplified by SEQ ID NO: 22, a CBA promoter exemplified by SEQ ID NO: 101, a chimeric intron exemplified by SEQ ID NO: 102 with a microRNA backbone and KCNQ4 targeting sequence exemplified by SEQ ID NO: 105 engineered into the chimeric intron, optionally a cloning site exemplified by SEQ ID NO: 156, an eGFP coding region exemplified by SEQ ID NO: 103, optionally a cloning site exemplified by SEQ ID NO: 157, a microRNA backbone and KCNQ4 targeting sequence exemplified by SEQ ID NO: 111, optionally a cloning site exemplified by SEQ ID NO: 158, a polyA site exemplified by SEQ ID NO: 36, optionally a cloning site exemplified by SEQ ID NO: 159, and a 3′ ITR exemplified by SEQ ID NO: 20.

[0273] In one embodiment, an exemplary construct comprises: a 5′ ITR exemplified by SEQ ID NO: 19, optionally a cloning site exemplified by SEQ ID NO: 155, a CMV enhancer exemplified by SEQ ID NO: 22, a CBA promoter exemplified by SEQ ID NO: 101, a chimeric intron exemplified by SEQ ID NO: 102 with a microRNA backbone and KCNQ4 targeting sequence exemplified by SEQ ID NO: 106 engineered into the chimeric intron, optionally a cloning site exemplified by SEQ ID NO: 156, an eGFP coding region exemplified by SEQ ID NO: 103, optionally a cloning site exemplified by SEQ ID NO: 157, a microRNA backbone and KCNQ4 targeting sequence exemplified by SEQ ID NO: 112, optionally a cloning site exemplified by SEQ ID NO: 158, a polyA site exemplified by SEQ ID NO: 36, optionally a cloning site exemplified by SEQ ID NO: 159, and a 3′ ITR exemplified by SEQ ID NO: 20.

[0274] In one embodiment, an exemplary construct comprises: a 5′ ITR exemplified by SEQ ID NO: 19, optionally a cloning site exemplified by SEQ ID NO: 155, a CMV enhancer exemplified by SEQ ID NO: 22, a CBA promoter exemplified by SEQ ID NO: 101, a chimeric intron exemplified by SEQ ID NO: 102 with a microRNA backbone and KCNQ4 targeting sequence exemplified by SEQ ID NO: 104 engineered into the chimeric intron, optionally a cloning site exemplified by SEQ ID NO: 156, an eGFP coding region exemplified by SEQ ID NO: 103, optionally a cloning site exemplified by SEQ ID NO: 157, a microRNA backbone and KCNQ4 targeting sequence exemplified by SEQ ID NO: 113, optionally a cloning site exemplified by SEQ ID NO: 158, a polyA site exemplified by SEQ ID NO: 36, optionally a cloning site exemplified by SEQ ID NO: 159, and a 3′ ITR exemplified by SEQ ID NO: 20.

[0275] In one embodiment, an exemplary construct comprises: a 5′ ITR exemplified by SEQ ID NO: 19, optionally a cloning site exemplified by SEQ ID NO: 155, a CMV enhancer exemplified by SEQ ID NO: 22, a CBA promoter exemplified by SEQ ID NO: 101, a chimeric intron exemplified by SEQ ID NO: 102 with a microRNA backbone and KCNQ4 targeting sequence exemplified by SEQ ID NO: 105 engineered into the chimeric intron, optionally a cloning site exemplified by SEQ ID NO: 156, an eGFP coding region exemplified by SEQ ID NO: 103, optionally a cloning site exemplified by SEQ ID NO: 157, a microRNA backbone and KCNQ4 targeting sequence exemplified by SEQ ID NO: 114, optionally a cloning site exemplified by SEQ ID NO: 158, a polyA site exemplified by SEQ ID NO: 36, optionally a cloning site exemplified by SEQ ID NO: 159, and a 3′ ITR exemplified by SEQ ID NO: 20.

[0276] In one embodiment, an exemplary construct comprises: a 5′ ITR exemplified by SEQ ID NO: 19, optionally a cloning site exemplified by SEQ ID NO: 155, a CMV enhancer exemplified by SEQ ID NO: 22, a CBA promoter exemplified by SEQ ID NO: 101, a chimeric intron exemplified by SEQ ID NO: 102 with a microRNA backbone and KCNQ4 targeting sequence exemplified by SEQ ID NO: 106 engineered into the chimeric intron, optionally a cloning site exemplified by SEQ ID NO: 156, an eGFP coding region exemplified by SEQ ID NO: 103, optionally a cloning site exemplified by SEQ ID NO: 157, a microRNA backbone and KCNQ4 targeting sequence exemplified by SEQ ID NO: 115, optionally a cloning site exemplified by SEQ ID NO: 158, a polyA site exemplified by SEQ ID NO: 36, optionally a cloning site exemplified by SEQ ID NO: 159, and a 3′ ITR exemplified by SEQ ID NO: 20.

[0277] In one embodiment, an exemplary construct comprises: a 5′ ITR exemplified by SEQ ID NO: 19, optionally a cloning site exemplified by SEQ ID NO: 155, a CMV enhancer exemplified by SEQ ID NO: 22, a CBA promoter exemplified by SEQ ID NO: 101, a chimeric intron exemplified by SEQ ID NO: 102 with a microRNA backbone and KCNQ4 targeting sequence exemplified by SEQ ID NO: 107 engineered into the chimeric intron, optionally a cloning site exemplified by SEQ ID NO: 156, an eGFP coding region exemplified by SEQ ID NO: 103, optionally a cloning site exemplified by SEQ ID NO: 157, a microRNA backbone and KCNQ4 targeting sequence exemplified by SEQ ID NO: 107, optionally a cloning site exemplified by SEQ ID NO: 158, a polyA site exemplified by SEQ ID NO: 36, optionally a cloning site exemplified by SEQ ID NO: 159, and a 3′ ITR exemplified by SEQ ID NO: 20.

[0278] In one embodiment, an exemplary construct comprises: a 5′ ITR exemplified by SEQ ID NO: 19, optionally a cloning site exemplified by SEQ ID NO: 155, a CMV enhancer exemplified by SEQ ID NO: 22, a CBA promoter exemplified by SEQ ID NO: 101, a chimeric intron exemplified by SEQ ID NO: 102 with a microRNA backbone and KCNQ4 targeting sequence exemplified by SEQ ID NO: 108 engineered into the chimeric intron, optionally a cloning site exemplified by SEQ ID NO: 156, an eGFP coding region exemplified by SEQ ID NO: 103, optionally a cloning site exemplified by SEQ ID NO: 157, a microRNA backbone and KCNQ4 targeting sequence exemplified by SEQ ID NO: 108, optionally a cloning site exemplified by SEQ ID NO: 158, a polyA site exemplified by SEQ ID NO: 36, optionally a cloning site exemplified by SEQ ID NO: 159, and a 3′ ITR exemplified by SEQ ID NO: 20.

[0279] In one embodiment, an exemplary construct comprises: a 5′ ITR exemplified by SEQ ID NO: 19, optionally a cloning site exemplified by SEQ ID NO: 155, a CMV enhancer exemplified by SEQ ID NO: 22, a CBA promoter exemplified by SEQ ID NO: 101, a chimeric intron exemplified by SEQ ID NO: 102 with a microRNA backbone and KCNQ4 targeting sequence exemplified by SEQ ID NO: 109 engineered into the chimeric intron, optionally a cloning site exemplified by SEQ ID NO: 156, an eGFP coding region exemplified by SEQ ID NO: 103, optionally a cloning site exemplified by SEQ ID NO: 157, a microRNA backbone and KCNQ4 targeting sequence exemplified by SEQ ID NO: 109, optionally a cloning site exemplified by SEQ ID NO: 158, a polyA site exemplified by SEQ ID NO: 36, optionally a cloning site exemplified by SEQ ID NO: 159, and a 3′ ITR exemplified by SEQ ID NO: 20.

[0280] In one embodiment, an exemplary construct comprises: a 5′ ITR exemplified by SEQ ID NO: 19, optionally a cloning site exemplified by SEQ ID NO: 155, a CMV enhancer exemplified by SEQ ID NO: 22, a CBA promoter exemplified by SEQ ID NO: 101, a chimeric intron exemplified by SEQ ID NO: 102 with a microRNA backbone and KCNQ4 targeting sequence exemplified by SEQ ID NO: 107 engineered into the chimeric intron, optionally a cloning site exemplified by SEQ ID NO: 156, an eGFP coding region exemplified by SEQ ID NO: 103, optionally a cloning site exemplified by SEQ ID NO: 157, a microRNA backbone and KCNQ4 targeting sequence exemplified by SEQ ID NO: 110, optionally a cloning site exemplified by SEQ ID NO: 158, a polyA site exemplified by SEQ ID NO: 36, optionally a cloning site exemplified by SEQ ID NO: 159, and a 3′ ITR exemplified by SEQ ID NO: 20.

[0281] In one embodiment, an exemplary construct comprises: a 5′ ITR exemplified by SEQ ID NO: 19, optionally a cloning site exemplified by SEQ ID NO: 155, a CMV enhancer exemplified by SEQ ID NO: 22, a CBA promoter exemplified by SEQ ID NO: 101, a chimeric intron exemplified by SEQ ID NO: 102 with a microRNA backbone and KCNQ4 targeting sequence exemplified by SEQ ID NO: 108 engineered into the chimeric intron, optionally a cloning site exemplified by SEQ ID NO: 156, an eGFP coding region exemplified by SEQ ID NO: 103, optionally a cloning site exemplified by SEQ ID NO: 157, a microRNA backbone and KCNQ4 targeting sequence exemplified by SEQ ID NO: 111, optionally a cloning site exemplified by SEQ ID NO: 158, a polyA site exemplified by SEQ ID NO: 36, optionally a cloning site exemplified by SEQ ID NO: 159, and a 3′ ITR exemplified by SEQ ID NO: 20.

[0282] In one embodiment, an exemplary construct comprises: a 5′ ITR exemplified by SEQ ID NO: 19, optionally a cloning site exemplified by SEQ ID NO: 155, a CMV enhancer exemplified by SEQ ID NO: 22, a CBA promoter exemplified by SEQ ID NO: 101, a chimeric intron exemplified by SEQ ID NO: 102 with a microRNA backbone and KCNQ4 targeting sequence exemplified by SEQ ID NO: 109 engineered into the chimeric intron, optionally a cloning site exemplified by SEQ ID NO: 156, an eGFP coding region exemplified by SEQ ID NO: 103, optionally a cloning site exemplified by SEQ ID NO: 157, a microRNA backbone and KCNQ4 targeting sequence exemplified by SEQ ID NO: 112, optionally a cloning site exemplified by SEQ ID NO: 158, a polyA site exemplified by SEQ ID NO: 36, optionally a cloning site exemplified by SEQ ID NO: 159, and a 3′ ITR exemplified by SEQ ID NO: 20.

[0283] In one embodiment, an exemplary construct comprises: a 5′ ITR exemplified by SEQ ID NO: 19, optionally a cloning site exemplified by SEQ ID NO: 155, a CMV enhancer exemplified by SEQ ID NO: 22, a CBA promoter exemplified by SEQ ID NO: 101, a chimeric intron exemplified by SEQ ID NO: 102 with a microRNA backbone and KCNQ4 targeting sequence exemplified by SEQ ID NO: 107 engineered into the chimeric intron, optionally a cloning site exemplified by SEQ ID NO: 156, an eGFP coding region exemplified by SEQ ID NO: 103, optionally a cloning site exemplified by SEQ ID NO: 157, a microRNA backbone and KCNQ4 targeting sequence exemplified by SEQ ID NO: 113, optionally a cloning site exemplified by SEQ ID NO: 158, a polyA site exemplified by SEQ ID NO: 36, optionally a cloning site exemplified by SEQ ID NO: 159, and a 3′ ITR exemplified by SEQ ID NO: 20.

[0284] In one embodiment, an exemplary construct comprises: a 5′ ITR exemplified by SEQ ID NO: 19, optionally a cloning site exemplified by SEQ ID NO: 155, a CMV enhancer exemplified by SEQ ID NO: 22, a CBA promoter exemplified by SEQ ID NO: 101, a chimeric intron exemplified by SEQ ID NO: 102 with a microRNA backbone and KCNQ4 targeting sequence exemplified by SEQ ID NO: 108 engineered into the chimeric intron, optionally a cloning site exemplified by SEQ ID NO: 156, an eGFP coding region exemplified by SEQ ID NO: 103, optionally a cloning site exemplified by SEQ ID NO: 157, a microRNA backbone and KCNQ4 targeting sequence exemplified by SEQ ID NO: 114, optionally a cloning site exemplified by SEQ ID NO: 158, a polyA site exemplified by SEQ ID NO: 36, optionally a cloning site exemplified by SEQ ID NO: 159, and a 3′ ITR exemplified by SEQ ID NO: 20.

[0285] In one embodiment, an exemplary construct comprises: a 5′ ITR exemplified by SEQ ID NO: 19, optionally a cloning site exemplified by SEQ ID NO: 155, a CMV enhancer exemplified by SEQ ID NO: 22, a CBA promoter exemplified by SEQ ID NO: 101, a chimeric intron exemplified by SEQ ID NO: 102 with a microRNA backbone and KCNQ4 targeting sequence exemplified by SEQ ID NO: 109 engineered into the chimeric intron, optionally a cloning site exemplified by SEQ ID NO: 156, an eGFP coding region exemplified by SEQ ID NO: 103, optionally a cloning site exemplified by SEQ ID NO: 157, a microRNA backbone and KCNQ4 targeting sequence exemplified by SEQ ID NO: 114, optionally a cloning site exemplified by SEQ ID NO: 158, a polyA site exemplified by SEQ ID NO: 36, optionally a cloning site exemplified by SEQ ID NO: 159, and a 3′ ITR exemplified by SEQ ID NO: 20.

[0286] In one embodiment, an exemplary construct comprises: a 5′ ITR exemplified by SEQ ID NO: 19, optionally a cloning site exemplified by SEQ ID NO: 155, a CMV enhancer exemplified by SEQ ID NO: 22, a CBA promoter exemplified by SEQ ID NO: 101, a chimeric intron exemplified by SEQ ID NO: 102 with a microRNA backbone and KCNQ4 targeting sequence exemplified by SEQ ID NO: 110 engineered into the chimeric intron, optionally a cloning site exemplified by SEQ ID NO: 156, an eGFP coding region exemplified by SEQ ID NO: 103, optionally a cloning site exemplified by SEQ ID NO: 157, a microRNA backbone and KCNQ4 targeting sequence exemplified by SEQ ID NO: 110, optionally a cloning site exemplified by SEQ ID NO: 158, a polyA site exemplified by SEQ ID NO: 36, optionally a cloning site exemplified by SEQ ID NO: 159, and a 3′ ITR exemplified by SEQ ID NO: 20.

[0287] In one embodiment, an exemplary construct comprises: a 5′ ITR exemplified by SEQ ID NO: 19, optionally a cloning site exemplified by SEQ ID NO: 155, a CMV enhancer exemplified by SEQ ID NO: 22, a CBA promoter exemplified by SEQ ID NO: 101, a chimeric intron exemplified by SEQ ID NO: 102 with a microRNA backbone and KCNQ4 targeting sequence exemplified by SEQ ID NO: 111 engineered into the chimeric intron, optionally a cloning site exemplified by SEQ ID NO: 156, an eGFP coding region exemplified by SEQ ID NO: 103, optionally a cloning site exemplified by SEQ ID NO: 157, a microRNA backbone and KCNQ4 targeting sequence exemplified by SEQ ID NO: 111, optionally a cloning site exemplified by SEQ ID NO: 158, a polyA site exemplified by SEQ ID NO: 36, optionally a cloning site exemplified by SEQ ID NO: 159, and a 3′ ITR exemplified by SEQ ID NO: 20.

[0288] In one embodiment, an exemplary construct comprises: a 5′ ITR exemplified by SEQ ID NO: 19, optionally a cloning site exemplified by SEQ ID NO: 155, a CMV enhancer exemplified by SEQ ID NO: 22, a CBA promoter exemplified by SEQ ID NO: 101, a chimeric intron exemplified by SEQ ID NO: 102 with a microRNA backbone and KCNQ4 targeting sequence exemplified by SEQ ID NO: 112 engineered into the chimeric intron, optionally a cloning site exemplified by SEQ ID NO: 156, an eGFP coding region exemplified by SEQ ID NO: 103, optionally a cloning site exemplified by SEQ ID NO: 157, a microRNA backbone and KCNQ4 targeting sequence exemplified by SEQ ID NO: 112, optionally a cloning site exemplified by SEQ ID NO: 158, a polyA site exemplified by SEQ ID NO: 36, optionally a cloning site exemplified by SEQ ID NO: 159, and a 3′ ITR exemplified by SEQ ID NO: 20.

[0289] In one embodiment, an exemplary construct comprises: a 5′ ITR exemplified by SEQ ID NO: 19, optionally a cloning site exemplified by SEQ ID NO: 155, a CMV enhancer exemplified by SEQ ID NO: 22, a CBA promoter exemplified by SEQ ID NO: 101, a chimeric intron exemplified by SEQ ID NO: 102 with a microRNA backbone and KCNQ4 targeting sequence exemplified by SEQ ID NO: 110 engineered into the chimeric intron, optionally a cloning site exemplified by SEQ ID NO: 156, an eGFP coding region exemplified by SEQ ID NO: 103, optionally a cloning site exemplified by SEQ ID NO: 157, a microRNA backbone and KCNQ4 targeting sequence exemplified by SEQ ID NO: 113, optionally a cloning site exemplified by SEQ ID NO: 158, a polyA site exemplified by SEQ ID NO: 36, optionally a cloning site exemplified by SEQ ID NO: 159, and a 3′ ITR exemplified by SEQ ID NO: 20.

[0290] In one embodiment, an exemplary construct comprises: a 5′ ITR exemplified by SEQ ID NO: 19, optionally a cloning site exemplified by SEQ ID NO: 155, a CMV enhancer exemplified by SEQ ID NO: 22, a CBA promoter exemplified by SEQ ID NO: 101, a chimeric intron exemplified by SEQ ID NO: 102 with a microRNA backbone and KCNQ4 targeting sequence exemplified by SEQ ID NO: 111 engineered into the chimeric intron, optionally a cloning site exemplified by SEQ ID NO: 156, an eGFP coding region exemplified by SEQ ID NO: 103, optionally a cloning site exemplified by SEQ ID NO: 157, a microRNA backbone and KCNQ4 targeting sequence exemplified by SEQ ID NO: 114, optionally a cloning site exemplified by SEQ ID NO: 158, a polyA site exemplified by SEQ ID NO: 36, optionally a cloning site exemplified by SEQ ID NO: 159, and a 3′ ITR exemplified by SEQ ID NO: 20.

[0291] In one embodiment, an exemplary construct comprises: a 5′ ITR exemplified by SEQ ID NO: 19, optionally a cloning site exemplified by SEQ ID NO: 155, a CMV enhancer exemplified by SEQ ID NO: 22, a CBA promoter exemplified by SEQ ID NO: 101, a chimeric intron exemplified by SEQ ID NO: 102 with a microRNA backbone and KCNQ4 targeting sequence exemplified by SEQ ID NO: 112 engineered into the chimeric intron, optionally a cloning site exemplified by SEQ ID NO: 156, an eGFP coding region exemplified by SEQ ID NO: 103, optionally a cloning site exemplified by SEQ ID NO: 157, a microRNA backbone and KCNQ4 targeting sequence exemplified by SEQ ID NO: 115, optionally a cloning site exemplified by SEQ ID NO: 158, a polyA site exemplified by SEQ ID NO: 36, optionally a cloning site exemplified by SEQ ID NO: 159, and a 3′ ITR exemplified by SEQ ID NO: 20.

[0292] In one embodiment, an exemplary construct comprises: a 5′ ITR exemplified by SEQ ID NO: 19, optionally a cloning site exemplified by SEQ ID NO: 155, a CMV enhancer exemplified by SEQ ID NO: 22, a CBA promoter exemplified by SEQ ID NO: 101, a chimeric intron exemplified by SEQ ID NO: 102 with a microRNA backbone and KCNQ4 targeting sequence exemplified by SEQ ID NO: 113 engineered into the chimeric intron, optionally a cloning site exemplified by SEQ ID NO: 156, an eGFP coding region exemplified by SEQ ID NO: 103, optionally a cloning site exemplified by SEQ ID NO: 157, a microRNA backbone and KCNQ4 targeting sequence exemplified by SEQ ID NO: 113, optionally a cloning site exemplified by SEQ ID NO: 158, a polyA site exemplified by SEQ ID NO: 36, optionally a cloning site exemplified by SEQ ID NO: 159, and a 3′ ITR exemplified by SEQ ID NO: 20.

[0293] In one embodiment, an exemplary construct comprises: a 5′ ITR exemplified by SEQ ID NO: 19, optionally a cloning site exemplified by SEQ ID NO: 155, a CMV enhancer exemplified by SEQ ID NO: 22, a CBA promoter exemplified by SEQ ID NO: 101, a chimeric intron exemplified by SEQ ID NO: 102 with a microRNA backbone and KCNQ4 targeting sequence exemplified by SEQ ID NO: 114 engineered into the chimeric intron, optionally a cloning site exemplified by SEQ ID NO: 156, an eGFP coding region exemplified by SEQ ID NO: 103, optionally a cloning site exemplified by SEQ ID NO: 157, a microRNA backbone and KCNQ4 targeting sequence exemplified by SEQ ID NO: 114, optionally a cloning site exemplified by SEQ ID NO: 158, a polyA site exemplified by SEQ ID NO: 36, optionally a cloning site exemplified by SEQ ID NO: 159, and a 3′ ITR exemplified by SEQ ID NO: 20.

[0294] In one embodiment, an exemplary construct comprises: a 5′ ITR exemplified by SEQ ID NO: 19, optionally a cloning site exemplified by SEQ ID NO: 155, a CMV enhancer exemplified by SEQ ID NO: 22, a CBA promoter exemplified by SEQ ID NO: 101, a chimeric intron exemplified by SEQ ID NO: 102 with a microRNA backbone and KCNQ4 targeting sequence exemplified by SEQ ID NO: 115 engineered into the chimeric intron, optionally a cloning site exemplified by SEQ ID NO: 156, an eGFP coding region exemplified by SEQ ID NO: 103, optionally a cloning site exemplified by SEQ ID NO: 157, a microRNA backbone and KCNQ4 targeting sequence exemplified by SEQ ID NO: 115, optionally a cloning site exemplified by SEQ ID NO: 158, a polyA site exemplified by SEQ ID NO: 36, optionally a cloning site exemplified by SEQ ID NO: 159, and a 3′ ITR exemplified by SEQ ID NO: 20.

Twenty (20) miRNA Construct Sequences and Background NNNNN Sequences

[0295] In one embodiment, an exemplary construct comprises: a 5′ ITR exemplified by SEQ ID NO: 19, optionally a cloning site exemplified by SEQ ID NO: 155, a CMV enhancer exemplified by SEQ ID NO: 22, a CBA promoter exemplified by SEQ ID NO: 101, a chimeric intron exemplified by SEQ ID NO: 102 with a microRNA backbone and KCNQ4 targeting sequence exemplified by SEQ ID NO: 116 engineered into the chimeric intron, optionally a cloning site exemplified by SEQ ID NO: 156, an eGFP coding region exemplified by SEQ ID NO: 103, optionally a cloning site exemplified by SEQ ID NO: 157, a microRNA backbone and KCNQ4 targeting sequence exemplified by SEQ ID NO: 116, optionally a cloning site exemplified by SEQ ID NO: 158, a polyA site exemplified by SEQ ID NO: 36, optionally a cloning site exemplified by SEQ ID NO: 159, and a 3′ ITR exemplified by SEQ ID NO: 20.

[0296] In one embodiment, an exemplary construct comprises: a 5′ ITR exemplified by SEQ ID NO: 19, optionally a cloning site exemplified by SEQ ID NO: 155, a CMV enhancer exemplified by SEQ ID NO: 22, a CBA promoter exemplified by SEQ ID NO: 101, a chimeric intron exemplified by SEQ ID NO: 102 with a microRNA backbone and KCNQ4 targeting sequence exemplified by SEQ ID NO: 116 engineered into the chimeric intron, optionally a cloning site exemplified by SEQ ID NO: 156, an eGFP coding region exemplified by SEQ ID NO: 103, optionally a cloning site exemplified by SEQ ID NO: 158, a polyA site exemplified by SEQ ID NO: 36, optionally a cloning site exemplified by SEQ ID NO: 159, and a 3′ ITR exemplified by SEQ ID NO: 20.

[0297] In one embodiment, an exemplary construct comprises: a 5′ ITR exemplified by SEQ ID NO: 19, optionally a cloning site exemplified by SEQ ID NO: 155, a CMV enhancer exemplified by SEQ ID NO: 22, a CBA promoter exemplified by SEQ ID NO: 24, a chimeric intron exemplified by SEQ ID NO: 102, optionally a cloning site exemplified by SEQ ID NO: 156, an eGFP coding region exemplified by SEQ ID NO: 103, a microRNA backbone and KCNQ4 targeting sequence exemplified by SEQ ID NO: 134, optionally a cloning site exemplified by SEQ ID NO: 158, a polyA site exemplified by SEQ ID NO: 36, optionally a cloning site exemplified by SEQ ID NO: 159, and a 3′ ITR exemplified by SEQ ID NO: 20.

[0298] In one embodiment, an exemplary construct comprises: a 5′ ITR exemplified by SEQ ID NO: 19, optionally a cloning site exemplified by SEQ ID NO: 155, a CMV enhancer exemplified by SEQ ID NO: 22, a CBA promoter exemplified by SEQ ID NO: 101, a chimeric intron exemplified by SEQ ID NO: 102 with a microRNA backbone and KCNQ4 targeting sequence exemplified by SEQ ID NO: 117 engineered into the chimeric intron, optionally a cloning site exemplified by SEQ ID NO: 156, an eGFP coding region exemplified by SEQ ID NO: 103, optionally a cloning site exemplified by SEQ ID NO: 157, a microRNA backbone and KCNQ4 targeting sequence exemplified by SEQ ID NO: 117, optionally a cloning site exemplified by SEQ ID NO: 158, a polyA site exemplified by SEQ ID NO: 36, optionally a cloning site exemplified by SEQ ID NO: 159, and a 3′ ITR exemplified by SEQ ID NO: 20.

[0299] In one embodiment, an exemplary construct comprises: a 5′ ITR exemplified by SEQ ID NO: 19, optionally a cloning site exemplified by SEQ ID NO: 155, a CMV enhancer exemplified by SEQ ID NO: 22, a CBA promoter exemplified by SEQ ID NO: 101, a chimeric intron exemplified by SEQ ID NO: 102 with a microRNA backbone and KCNQ4 targeting sequence exemplified by SEQ ID NO: 118 engineered into the chimeric intron, optionally a cloning site exemplified by SEQ ID NO: 156, an eGFP coding region exemplified by SEQ ID NO: 103, optionally a cloning site exemplified by SEQ ID NO: 157, a microRNA backbone and KCNQ4 targeting sequence exemplified by SEQ ID NO: 118, optionally a cloning site exemplified by SEQ ID NO: 158, a polyA site exemplified by SEQ ID NO: 36, optionally a cloning site exemplified by SEQ ID NO: 159, and a 3′ ITR exemplified by SEQ ID NO: 20.

[0300] In one embodiment, an exemplary construct comprises: a 5′ ITR exemplified by SEQ ID NO: 19, optionally a cloning site exemplified by SEQ ID NO: 155, a CMV enhancer exemplified by SEQ ID NO: 22, a CBA promoter exemplified by SEQ ID NO: 101, a chimeric intron exemplified by SEQ ID NO: 102 with a microRNA backbone and KCNQ4 targeting sequence exemplified by SEQ ID NO: 119 engineered into the chimeric intron, optionally a cloning site exemplified by SEQ ID NO: 156, an eGFP coding region exemplified by SEQ ID NO: 103, optionally a cloning site exemplified by SEQ ID NO: 157, a microRNA backbone and KCNQ4 targeting sequence exemplified by SEQ ID NO: 119, optionally a cloning site exemplified by SEQ ID NO: 158, a polyA site exemplified by SEQ ID NO: 36, optionally a cloning site exemplified by SEQ ID NO: 159, and a 3′ ITR exemplified by SEQ ID NO: 20.

[0301] In one embodiment, an exemplary construct comprises: a 5′ ITR exemplified by SEQ ID NO: 19, optionally a cloning site exemplified by SEQ ID NO: 155, a CMV enhancer exemplified by SEQ ID NO: 22, a CBA promoter exemplified by SEQ ID NO: 101, a chimeric intron exemplified by SEQ ID NO: 102 with a microRNA backbone and KCNQ4 targeting sequence exemplified by SEQ ID NO: 120 engineered into the chimeric intron, optionally a cloning site exemplified by SEQ ID NO: 156, an eGFP coding region exemplified by SEQ ID NO: 103, optionally a cloning site exemplified by SEQ ID NO: 157, a microRNA backbone and KCNQ4 targeting sequence exemplified by SEQ ID NO: 120, optionally a cloning site exemplified by SEQ ID NO: 158, a polyA site exemplified by SEQ ID NO: 36, optionally a cloning site exemplified by SEQ ID NO: 159, and a 3′ ITR exemplified by SEQ ID NO: 20.

[0302] In one embodiment, an exemplary construct comprises: a 5′ ITR exemplified by SEQ ID NO: 19, optionally a cloning site exemplified by SEQ ID NO: 155, a CMV enhancer exemplified by SEQ ID NO: 22, a CBA promoter exemplified by SEQ ID NO: 101, a chimeric intron exemplified by SEQ ID NO: 102 with a microRNA backbone and KCNQ4 targeting sequence exemplified by SEQ ID NO: 121 engineered into the chimeric intron, optionally a cloning site exemplified by SEQ ID NO: 156, an eGFP coding region exemplified by SEQ ID NO: 103, optionally a cloning site exemplified by SEQ ID NO: 157, a microRNA backbone and KCNQ4 targeting sequence exemplified by SEQ ID NO: 121, optionally a cloning site exemplified by SEQ ID NO: 158, a polyA site exemplified by SEQ ID NO: 36, optionally a cloning site exemplified by SEQ ID NO: 159, and a 3′ ITR exemplified by SEQ ID NO: 20.

[0303] In one embodiment, an exemplary construct comprises: a 5′ ITR exemplified by SEQ ID NO: 19, optionally a cloning site exemplified by SEQ ID NO: 155, a CMV enhancer exemplified by SEQ ID NO: 22, a CBA promoter exemplified by SEQ ID NO: 101, a chimeric intron exemplified by SEQ ID NO: 102 with a microRNA backbone and KCNQ4 targeting sequence exemplified by SEQ ID NO: 122 engineered into the chimeric intron, optionally a cloning site exemplified by SEQ ID NO: 156, an eGFP coding region exemplified by SEQ ID NO: 103, optionally a cloning site exemplified by SEQ ID NO: 157, a microRNA backbone and KCNQ4 targeting sequence exemplified by SEQ ID NO: 122, optionally a cloning site exemplified by SEQ ID NO: 158, a polyA site exemplified by SEQ ID NO: 36, optionally a cloning site exemplified by SEQ ID NO: 159, and a 3′ ITR exemplified by SEQ ID NO: 20.

[0304] In one embodiment, an exemplary construct comprises: a 5′ ITR exemplified by SEQ ID NO: 19, optionally a cloning site exemplified by SEQ ID NO: 155, a CMV enhancer exemplified by SEQ ID NO: 22, a CBA promoter exemplified by SEQ ID NO: 101, a chimeric intron exemplified by SEQ ID NO: 102 with a microRNA backbone and KCNQ4 targeting sequence exemplified by SEQ ID NO: 123 engineered into the chimeric intron, optionally a cloning site exemplified by SEQ ID NO: 156, an eGFP coding region exemplified by SEQ ID NO: 103, optionally a cloning site exemplified by SEQ ID NO: 157, a microRNA backbone and KCNQ4 targeting sequence exemplified by SEQ ID NO: 123, optionally a cloning site exemplified by SEQ ID NO: 158, a polyA site exemplified by SEQ ID NO: 36, optionally a cloning site exemplified by SEQ ID NO: 159, and a 3′ ITR exemplified by SEQ ID NO: 20.

[0305] In one embodiment, an exemplary construct comprises: a 5′ ITR exemplified by SEQ ID NO: 19, optionally a cloning site exemplified by SEQ ID NO: 155, a CMV enhancer exemplified by SEQ ID NO: 22, a CBA promoter exemplified by SEQ ID NO: 101, a chimeric intron exemplified by SEQ ID NO: 102 with a microRNA backbone and KCNQ4 targeting sequence exemplified by SEQ ID NO: 124 engineered into the chimeric intron, optionally a cloning site exemplified by SEQ ID NO: 156, an eGFP coding region exemplified by SEQ ID NO: 103, optionally a cloning site exemplified by SEQ ID NO: 157, a microRNA backbone and KCNQ4 targeting sequence exemplified by SEQ ID NO: 124, optionally a cloning site exemplified by SEQ ID NO: 158, a polyA site exemplified by SEQ ID NO: 36, optionally a cloning site exemplified by SEQ ID NO: 159, and a 3′ ITR exemplified by SEQ ID NO: 20.

[0306] In one embodiment, an exemplary construct comprises: a 5′ ITR exemplified by SEQ ID NO: 19, optionally a cloning site exemplified by SEQ ID NO: 155, a CMV enhancer exemplified by SEQ ID NO: 22, a CBA promoter exemplified by SEQ ID NO: 101, a chimeric intron exemplified by SEQ ID NO: 102 with a microRNA backbone and KCNQ4 targeting sequence exemplified by SEQ ID NO: 125 engineered into the chimeric intron, optionally a cloning site exemplified by SEQ ID NO: 156, an eGFP coding region exemplified by SEQ ID NO: 103, optionally a cloning site exemplified by SEQ ID NO: 157, a microRNA backbone and KCNQ4 targeting sequence exemplified by SEQ ID NO: 125, optionally a cloning site exemplified by SEQ ID NO: 158, a polyA site exemplified by SEQ ID NO: 36, optionally a cloning site exemplified by SEQ ID NO: 159, and a 3′ ITR exemplified by SEQ ID NO: 20.

[0307] In one embodiment, an exemplary construct comprises: a 5′ ITR exemplified by SEQ ID NO: 19, optionally a cloning site exemplified by SEQ ID NO: 155, a CMV enhancer exemplified by SEQ ID NO: 22, a CBA promoter exemplified by SEQ ID NO: 101, a chimeric intron exemplified by SEQ ID NO: 102 with a microRNA backbone and KCNQ4 targeting sequence exemplified by SEQ ID NO: 126 engineered into the chimeric intron, optionally a cloning site exemplified by SEQ ID NO: 156, an eGFP coding region exemplified by SEQ ID NO: 103, optionally a cloning site exemplified by SEQ ID NO: 157, a microRNA backbone and KCNQ4 targeting sequence exemplified by SEQ ID NO: 126, optionally a cloning site exemplified by SEQ ID NO: 158, a polyA site exemplified by SEQ ID NO: 36, optionally a cloning site exemplified by SEQ ID NO: 159, and a 3′ ITR exemplified by SEQ ID NO: 20.

[0308] In one embodiment, an exemplary construct comprises: a 5′ ITR exemplified by SEQ ID NO: 19, optionally a cloning site exemplified by SEQ ID NO: 155, a CMV enhancer exemplified by SEQ ID NO: 22, a CBA promoter exemplified by SEQ ID NO: 101, a chimeric intron exemplified by SEQ ID NO: 102 with a microRNA backbone and KCNQ4 targeting sequence exemplified by SEQ ID NO: 127 engineered into the chimeric intron, optionally a cloning site exemplified by SEQ ID NO: 156, an eGFP coding region exemplified by SEQ ID NO: 103, optionally a cloning site exemplified by SEQ ID NO: 157, a microRNA backbone and KCNQ4 targeting sequence exemplified by SEQ ID NO: 127, optionally a cloning site exemplified by SEQ ID NO: 158, a polyA site exemplified by SEQ ID NO: 36, optionally a cloning site exemplified by SEQ ID NO: 159, and a 3′ ITR exemplified by SEQ ID NO: 20.

[0309] In one embodiment, an exemplary construct comprises: a 5′ ITR exemplified by SEQ ID NO: 19, optionally a cloning site exemplified by SEQ ID NO: 155, a CMV enhancer exemplified by SEQ ID NO: 22, a CBA promoter exemplified by SEQ ID NO: 101, a chimeric intron exemplified by SEQ ID NO: 102 with a microRNA backbone and KCNQ4 targeting sequence exemplified by SEQ ID NO: 128 engineered into the chimeric intron, optionally a cloning site exemplified by SEQ ID NO: 156, an eGFP coding region exemplified by SEQ ID NO: 103, optionally a cloning site exemplified by SEQ ID NO: 157, a microRNA backbone and KCNQ4 targeting sequence exemplified by SEQ ID NO: 128, optionally a cloning site exemplified by SEQ ID NO: 158, a polyA site exemplified by SEQ ID NO: 36, optionally a cloning site exemplified by SEQ ID NO: 159, and a 3′ ITR exemplified by SEQ ID NO: 20.

[0310] In one embodiment, an exemplary construct comprises: a 5′ ITR exemplified by SEQ ID NO: 19, optionally a cloning site exemplified by SEQ ID NO: 155, a CMV enhancer exemplified by SEQ ID NO: 22, a CBA promoter exemplified by SEQ ID NO: 101, a chimeric intron exemplified by SEQ ID NO: 102 with a microRNA backbone and KCNQ4 targeting sequence exemplified by SEQ ID NO: 129 engineered into the chimeric intron, optionally a cloning site exemplified by SEQ ID NO: 156, an eGFP coding region exemplified by SEQ ID NO: 103, optionally a cloning site exemplified by SEQ ID NO: 157, a microRNA backbone and KCNQ4 targeting sequence exemplified by SEQ ID NO: 129, optionally a cloning site exemplified by SEQ ID NO: 158, a polyA site exemplified by SEQ ID NO: 36, optionally a cloning site exemplified by SEQ ID NO: 159, and a 3′ ITR exemplified by SEQ ID NO: 20.

[0311] In one embodiment, an exemplary construct comprises: a 5′ ITR exemplified by SEQ ID NO: 19, optionally a cloning site exemplified by SEQ ID NO: 155, a CMV enhancer exemplified by SEQ ID NO: 22, a CBA promoter exemplified by SEQ ID NO: 101, a chimeric intron exemplified by SEQ ID NO: 102 with a microRNA backbone and KCNQ4 targeting sequence exemplified by SEQ ID NO: 130 engineered into the chimeric intron, optionally a cloning site exemplified by SEQ ID NO: 156, an eGFP coding region exemplified by SEQ ID NO: 103, optionally a cloning site exemplified by SEQ ID NO: 157, a microRNA backbone and KCNQ4 targeting sequence exemplified by SEQ ID NO: 130, optionally a cloning site exemplified by SEQ ID NO: 158, a polyA site exemplified by SEQ ID NO: 36, optionally a cloning site exemplified by SEQ ID NO: 159, and a 3′ ITR exemplified by SEQ ID NO: 20.

[0312] In one embodiment, an exemplary construct comprises: a 5′ ITR exemplified by SEQ ID NO: 19, optionally a cloning site exemplified by SEQ ID NO: 155, a CMV enhancer exemplified by SEQ ID NO: 22, a CBA promoter exemplified by SEQ ID NO: 101, a chimeric intron exemplified by SEQ ID NO: 102 with a microRNA backbone and KCNQ4 targeting sequence exemplified by SEQ ID NO: 131 engineered into the chimeric intron, optionally a cloning site exemplified by SEQ ID NO: 156, an eGFP coding region exemplified by SEQ ID NO: 103, optionally a cloning site exemplified by SEQ ID NO: 157, a microRNA backbone and KCNQ4 targeting sequence exemplified by SEQ ID NO: 131, optionally a cloning site exemplified by SEQ ID NO: 158, a polyA site exemplified by SEQ ID NO: 36, optionally a cloning site exemplified by SEQ ID NO: 159, and a 3′ ITR exemplified by SEQ ID NO: 20.

[0313] In one embodiment, an exemplary construct comprises: a 5′ ITR exemplified by SEQ ID NO: 19, optionally a cloning site exemplified by SEQ ID NO: 155, a CMV enhancer exemplified by SEQ ID NO: 22, a CBA promoter exemplified by SEQ ID NO: 101, a chimeric intron exemplified by SEQ ID NO: 102 with a microRNA backbone and KCNQ4 targeting sequence exemplified by SEQ ID NO: 132 engineered into the chimeric intron, optionally a cloning site exemplified by SEQ ID NO: 156, an eGFP coding region exemplified by SEQ ID NO: 103, optionally a cloning site exemplified by SEQ ID NO: 157, a microRNA backbone and KCNQ4 targeting sequence exemplified by SEQ ID NO: 132, optionally a cloning site exemplified by SEQ ID NO: 158, a polyA site exemplified by SEQ ID NO: 36, optionally a cloning site exemplified by SEQ ID NO: 159, and a 3′ ITR exemplified by SEQ ID NO: 20.

[0314] In one embodiment, an exemplary construct comprises: a 5′ ITR exemplified by SEQ ID NO: 19, optionally a cloning site exemplified by SEQ ID NO: 155, a CMV enhancer exemplified by SEQ ID NO: 22, a CBA promoter exemplified by SEQ ID NO: 101, a chimeric intron exemplified by SEQ ID NO: 102 with a microRNA backbone and KCNQ4 targeting sequence exemplified by SEQ ID NO: 133 engineered into the chimeric intron, optionally a cloning site exemplified by SEQ ID NO: 156, an eGFP coding region exemplified by SEQ ID NO: 103, optionally a cloning site exemplified by SEQ ID NO: 157, a microRNA backbone and KCNQ4 targeting sequence exemplified by SEQ ID NO: 133, optionally a cloning site exemplified by SEQ ID NO: 158, a polyA site exemplified by SEQ ID NO: 36, optionally a cloning site exemplified by SEQ ID NO: 159, and a 3′ ITR exemplified by SEQ ID NO: 20.

[0315] In one embodiment, an exemplary construct comprises: a 5′ ITR exemplified by SEQ ID NO: 19, optionally a cloning site exemplified by SEQ ID NO: 155, a CMV enhancer exemplified by SEQ ID NO: 22, a CBA promoter exemplified by SEQ ID NO: 101, a chimeric intron exemplified by SEQ ID NO: 102 with a microRNA backbone and KCNQ4 targeting sequence exemplified by SEQ ID NO: 133 engineered into the chimeric intron, optionally a cloning site exemplified by SEQ ID NO: 156, an eGFP coding region exemplified by SEQ ID NO: 103, optionally a cloning site exemplified by SEQ ID NO: 157, a microRNA backbone and KCNQ4 targeting sequence exemplified by SEQ ID NO: 133, optionally a cloning site exemplified by SEQ ID NO: 158, a polyA site exemplified by SEQ ID NO: 36, optionally a cloning site exemplified by SEQ ID NO: 159, and a 3′ ITR exemplified by SEQ ID NO: 20.

[0316] In some embodiments, an exemplary construct comprises: a 5′ ITR exemplified by SEQ ID NO: 19, optionally a cloning site exemplified by SEQ ID NO: 155, a CMV enhancer exemplified by SEQ ID NO: 22, a CBA promoter exemplified by SEQ ID NO: 101, a chimeric intron exemplified by SEQ ID NO: 102 with a microRNA backbone and KCNQ4 targeting sequence described herein engineered into the chimeric intron, optionally a cloning site exemplified by SEQ ID NO: 156, an eGFP coding region exemplified by SEQ ID NO: 103, optionally a cloning site exemplified by SEQ ID NO: 157, a microRNA backbone and KCNQ4 targeting sequence described herein, optionally a cloning site exemplified by SEQ ID NO: 158, a polyA site exemplified by SEQ ID NO: 36, optionally a cloning site exemplified by SEQ ID NO: 159, and a 3′ ITR exemplified by SEQ ID NO: 20.

[0317] In one embodiment, an exemplary construct comprises: a 5′ ITR exemplified by SEQ ID NO: 19, optionally a cloning site exemplified by SEQ ID NO: 155, a CMV enhancer exemplified by SEQ ID NO: 22, a CBA promoter exemplified by SEQ ID NO: 101, a chimeric intron exemplified by SEQ ID NO: 102 with a microRNA backbone and KCNQ4 targeting sequence described herein engineered into the chimeric intron, optionally a cloning site exemplified by SEQ ID NO: 156, an eGFP coding region exemplified by SEQ ID NO: 103, optionally a cloning site exemplified by SEQ ID NO: 158, a polyA site exemplified by SEQ ID NO: 36, optionally a cloning site exemplified by SEQ ID NO: 159, and a 3′ ITR exemplified by SEQ ID NO: 20.

[0318] In one embodiment, an exemplary construct comprises: a 5′ ITR exemplified by SEQ ID NO: 19, optionally a cloning site exemplified by SEQ ID NO: 155, a CMV enhancer exemplified by SEQ ID NO: 22, a CBA promoter exemplified by SEQ ID NO: 24, a chimeric intron exemplified by SEQ ID NO: 102, optionally a cloning site exemplified by SEQ ID NO: 156, an eGFP coding region exemplified by SEQ ID NO: 103, a microRNA backbone and KCNQ4 targeting sequence described herein, optionally a cloning site exemplified by SEQ ID NO: 158, a polyA site exemplified by SEQ ID NO: 36, optionally a cloning site exemplified by SEQ ID NO: 159, and a 3′ ITR exemplified by SEQ ID NO: 20.

[0319] In some embodiments, a microRNA backbone with a KCNQ4 targeting sequence occurs twice within the plasmid construct. For example, a microRNA backbone with a KCNQ4 targeting sequence can occur once in the 3′ untranslated region after the EGFP coding sequence. In some embodiments, a microRNA backbone with a KCNQ4 targeting sequence occurs once in the plasmid construct. For example, a microRNA backbone with a KCNQ4 targeting sequence can occur in the intron of the CAG promoter region. As another example, a microRNA backbone with a KCNQ4 targeting sequence can occur in the 3′ untranslated region after the EGFP coding sequence.

Eight (8) Luciferase and GFP Knockdown Constructs with shRNA Sequences

[0320] In one embodiment, an exemplary construct comprises: a 5′ ITR exemplified by SEQ ID NO: 19, optionally a cloning site exemplified by SEQ ID NO: 160, a CMV enhancer exemplified by SEQ ID NO: 98, a CMV promoter exemplified by SEQ ID NO: 99, optionally a cloning site exemplified by SEQ ID NO: 161, a luciferase coding sequence exemplified by SEQ ID NO: 140, optionally a cloning site exemplified by SEQ ID NO: 162, a T2A sequence exemplified by SEQ ID NO: 141, a turboGFP coding region exemplified by SEQ ID NO: 142, optionally a cloning site exemplified by SEQ ID NO: 163, an SV40 poly(A) site exemplified by SEQ ID NO: 143, optionally a cloning site exemplified by SEQ ID NO: 164, a U6 promoter sequence exemplified by SEQ ID NO: 144, an shRNA sequence described herein, a Pol III transcription termination sequence exemplified by SEQ ID NO: 149, optionally a cloning site exemplified by SEQ ID NO: 159, and a 3′ ITR exemplified by SEQ ID NO: 20.

[0321] In one embodiment, an exemplary construct comprises: a 5′ ITR exemplified by SEQ ID NO: 19, optionally a cloning site exemplified by SEQ ID NO: 160, a CMV enhancer exemplified by SEQ ID NO: 98, a CMV promoter exemplified by SEQ ID NO: 99, optionally a cloning site exemplified by SEQ ID NO: 161, a luciferase coding sequence exemplified by SEQ ID NO: 140, optionally a cloning site exemplified by SEQ ID NO: 162, a T2A sequence exemplified by SEQ ID NO: 141, a turboGFP coding region exemplified by SEQ ID NO: 142, optionally a cloning site exemplified by SEQ ID NO: 163, an SV40 poly(A) site exemplified by SEQ ID NO: 143, optionally a cloning site exemplified by SEQ ID NO: 164, a U6 promoter sequence exemplified by SEQ ID NO: 144, an shRNA sequence exemplified by SEQ ID NO: 48, a Pol III transcription termination sequence exemplified by SEQ ID NO: 149, optionally a cloning site exemplified by SEQ ID NO: 159, and a 3′ ITR exemplified by SEQ ID NO: 20.

[0322] In one embodiment, an exemplary construct comprises: a 5′ ITR exemplified by SEQ ID NO: 19, optionally a cloning site exemplified by SEQ ID NO: 160, a CMV enhancer exemplified by SEQ ID NO: 98, a CMV promoter exemplified by SEQ ID NO: 99, optionally a cloning site exemplified by SEQ ID NO: 161, a luciferase coding sequence exemplified by SEQ ID NO: 140, optionally a cloning site exemplified by SEQ ID NO: 162, a T2A sequence exemplified by SEQ ID NO: 141, a turboGFP coding region exemplified by SEQ ID NO: 142, optionally a cloning site exemplified by SEQ ID NO: 163, an SV40 poly(A) site exemplified by SEQ ID NO: 143, optionally a cloning site exemplified by SEQ ID NO: 164, a U6 promoter sequence exemplified by SEQ ID NO: 144, an shRNA sequence exemplified by SEQ ID NO: 49, a Pol III transcription termination sequence exemplified by SEQ ID NO: 149, optionally a cloning site exemplified by SEQ ID NO: 159, and a 3′ ITR exemplified by SEQ ID NO: 20.

[0323] In one embodiment, an exemplary construct comprises: a 5′ ITR exemplified by SEQ ID NO: 19, optionally a cloning site exemplified by SEQ ID NO: 160, a CMV enhancer exemplified by SEQ ID NO: 98, a CMV promoter exemplified by SEQ ID NO: 99, optionally a cloning site exemplified by SEQ ID NO: 161, a luciferase coding sequence exemplified by SEQ ID NO: 140, optionally a cloning site exemplified by SEQ ID NO: 162, a T2A sequence exemplified by SEQ ID NO: 141, a turboGFP coding region exemplified by SEQ ID NO: 142, optionally a cloning site exemplified by SEQ ID NO: 163, an SV40 poly(A) site exemplified by SEQ ID NO: 143, optionally a cloning site exemplified by SEQ ID NO: 164, a U6 promoter sequence exemplified by SEQ ID NO: 144, an shRNA sequence exemplified by SEQ ID NO: 50, a Pol III transcription termination sequence exemplified by SEQ ID NO: 149, optionally a cloning site exemplified by SEQ ID NO: 159, and a 3′ ITR exemplified by SEQ ID NO: 20.

[0324] In one embodiment, an exemplary construct comprises: a 5′ ITR exemplified by SEQ ID NO: 19, optionally a cloning site exemplified by SEQ ID NO: 160, a CMV enhancer exemplified by SEQ ID NO: 98, a CMV promoter exemplified by SEQ ID NO: 99, optionally a cloning site exemplified by SEQ ID NO: 161, a luciferase coding sequence exemplified by SEQ ID NO: 140, optionally a cloning site exemplified by SEQ ID NO: 162, a T2A sequence exemplified by SEQ ID NO: 141, a turboGFP coding region exemplified by SEQ ID NO: 142, optionally a cloning site exemplified by SEQ ID NO: 163, an SV40 poly(A) site exemplified by SEQ ID NO: 143, optionally a cloning site exemplified by SEQ ID NO: 164, a U6 promoter sequence exemplified by SEQ ID NO: 144, an shRNA sequence exemplified by SEQ ID NO: 51, a Pol III transcription termination sequence exemplified by SEQ ID NO: 149, optionally a cloning site exemplified by SEQ ID NO: 159, and a 3′ ITR exemplified by SEQ ID NO: 20.

[0325] In one embodiment, an exemplary construct comprises: a 5′ ITR exemplified by SEQ ID NO: 19, optionally a cloning site exemplified by SEQ ID NO: 160, a CMV enhancer exemplified by SEQ ID NO: 98, a CMV promoter exemplified by SEQ ID NO: 99, optionally a cloning site exemplified by SEQ ID NO: 161, a luciferase coding sequence exemplified by SEQ ID NO: 140, optionally a cloning site exemplified by SEQ ID NO: 162, a T2A sequence exemplified by SEQ ID NO: 141, a turboGFP coding region exemplified by SEQ ID NO: 142, optionally a cloning site exemplified by SEQ ID NO: 163, an SV40 poly(A) site exemplified by SEQ ID NO: 143, optionally a cloning site exemplified by SEQ ID NO: 164, a U6 promoter sequence exemplified by SEQ ID NO: 144, an shRNA sequence exemplified by SEQ ID NO: 52, a Pol III transcription termination sequence exemplified by SEQ ID NO: 149, optionally a cloning site exemplified by SEQ ID NO: 159, and a 3′ ITR exemplified by SEQ ID NO: 20.

[0326] In one embodiment, an exemplary construct comprises: a 5′ ITR exemplified by SEQ ID NO: 19, optionally a cloning site exemplified by SEQ ID NO: 160, a CMV enhancer exemplified by SEQ ID NO: 98, a CMV promoter exemplified by SEQ ID NO: 99, optionally a cloning site exemplified by SEQ ID NO: 161, a luciferase coding sequence exemplified by SEQ ID NO: 140, optionally a cloning site exemplified by SEQ ID NO: 162, a T2A sequence exemplified by SEQ ID NO: 141, a turboGFP coding region exemplified by SEQ ID NO: 142, optionally a cloning site exemplified by SEQ ID NO: 163, an SV40 poly(A) site exemplified by SEQ ID NO: 143, optionally a cloning site exemplified by SEQ ID NO: 164, a U6 promoter sequence exemplified by SEQ ID NO: 144, an shRNA sequence exemplified by SEQ ID NO: 53, a Pol III transcription termination sequence exemplified by SEQ ID NO: 149, optionally a cloning site exemplified by SEQ ID NO: 159, and a 3′ ITR exemplified by SEQ ID NO: 20.

[0327] In one embodiment, an exemplary construct comprises: a 5′ ITR exemplified by SEQ ID NO: 19, optionally a cloning site exemplified by SEQ ID NO: 160, a CMV enhancer exemplified by SEQ ID NO: 98, a CMV promoter exemplified by SEQ ID NO: 99, optionally a cloning site exemplified by SEQ ID NO: 161, a luciferase coding sequence exemplified by SEQ ID NO: 140, optionally a cloning site exemplified by SEQ ID NO: 162, a T2A sequence exemplified by SEQ ID NO: 141, a turboGFP coding region exemplified by SEQ ID NO: 142, optionally a cloning site exemplified by SEQ ID NO: 163, an SV40 poly(A) site exemplified by SEQ ID NO: 143, optionally a cloning site exemplified by SEQ ID NO: 164, a U6 promoter sequence exemplified by SEQ ID NO: 144, an shRNA sequence exemplified by SEQ ID NO: 54, a Pol III transcription termination sequence exemplified by SEQ ID NO: 149, optionally a cloning site exemplified by SEQ ID NO: 159, and a 3′ ITR exemplified by SEQ ID NO: 20.

[0328] In one embodiment, an exemplary construct comprises: a 5′ ITR exemplified by SEQ ID NO: 19, optionally a cloning site exemplified by SEQ ID NO: 160, a CMV enhancer exemplified by SEQ ID NO: 98, a CMV promoter exemplified by SEQ ID NO: 99, optionally a cloning site exemplified by SEQ ID NO: 161, a luciferase coding sequence exemplified by SEQ ID NO: 140, optionally a cloning site exemplified by SEQ ID NO: 162, a T2A sequence exemplified by SEQ ID NO: 141, a turboGFP coding region exemplified by SEQ ID NO: 142, optionally a cloning site exemplified by SEQ ID NO: 163, an SV40 poly(A) site exemplified by SEQ ID NO: 143, optionally a cloning site exemplified by SEQ ID NO: 164, a U6 promoter sequence exemplified by SEQ ID NO: 144, an shRNA sequence exemplified by SEQ ID NO: 55, a Pol III transcription termination sequence exemplified by SEQ ID NO: 149, optionally a cloning site exemplified by SEQ ID NO: 159, and a 3′ ITR exemplified by SEQ ID NO: 20.

Two (2) Wild-Type hKCNQ4 Construct Sequences

[0329] In one embodiment, an exemplary construct comprises: a 5′ ITR exemplified by SEQ ID NO: 19, optionally a cloning site exemplified by SEQ ID NO: 160, a CMV enhancer exemplified by SEQ ID NO: 98, a CMV promoter exemplified by SEQ ID NO: 99, optionally a cloning site exemplified by SEQ ID NO: 161, mKCNQ4 wild-type coding sequence exemplified by SEQ ID NO: 91, optionally a cloning site exemplified by SEQ ID NO: 165, a 3×Flag tag sequence exemplified by SEQ ID NO: 145, optionally a cloning site exemplified by SEQ ID NO: 162, a T2A sequence exemplified by SEQ ID NO: 141, an mScarlet coding region exemplified by SEQ ID NO: 146, optionally a cloning site exemplified by SEQ ID NO: 166, a bGHpoly(a) signal exemplified by SEQ ID NO: 36, optionally a cloning site exemplified by SEQ ID NO: 159, and a 3′ ITR exemplified by SEQ ID NO: 18.

[0330] In one embodiment, an exemplary construct comprises: a 5′ ITR exemplified by SEQ ID NO: 19, optionally a cloning site exemplified by SEQ ID NO: 160, a CMV enhancer exemplified by SEQ ID NO: 98, a CMV promoter exemplified by SEQ ID NO: 99, optionally a cloning site exemplified by SEQ ID NO: 161, hKCNQ4 wild-type coding sequence exemplified by SEQ ID NO: 90, optionally a cloning site exemplified by SEQ ID NO: 165, a 3×Flag tag sequence exemplified by SEQ ID NO: 145, optionally a cloning site exemplified by SEQ ID NO: 162, a T2A sequence exemplified by SEQ ID NO: 141, an mScarlet coding region exemplified by SEQ ID NO: 146, optionally a cloning site exemplified by SEQ ID NO: 166, a bGHpoly(a) signal exemplified by SEQ ID NO: 36, optionally a cloning site exemplified by SEQ ID NO: 159, and a 3′ ITR exemplified by SEQ ID NO: 18.

Five (5) Codon Optimized hKCNQ4 Construct Sequences

[0331] In one embodiment, an exemplary construct comprises: a 5′ ITR exemplified by SEQ ID NO: 19, optionally a cloning site exemplified by SEQ ID NO: 160, a CMV enhancer exemplified by SEQ ID NO: 98, a CMV promoter exemplified by SEQ ID NO: 99, optionally a cloning site exemplified by SEQ ID NO: 161, a hKCNQ4 codon optimized coding sequence exemplified by SEQ ID NO: 9, optionally a cloning site exemplified by SEQ ID NO: 165, a 3xFlag tag sequence exemplified by SEQ ID NO: 145, optionally a cloning site exemplified by SEQ ID NO: 162, a T2A sequence exemplified by SEQ ID NO: 141, a mScarlet coding region exemplified by SEQ ID NO: 146, optionally a cloning site exemplified by SEQ ID NO: 166, a bGHpoly(a) signal exemplified by SEQ ID NO: 36, optionally a cloning site exemplified by SEQ ID NO: 159, and a 3′ ITR exemplified by SEQ ID NO: 20.

[0332] In one embodiment, an exemplary construct comprises: a 5′ ITR exemplified by SEQ ID NO: 19, optionally a cloning site exemplified by SEQ ID NO: 160, a CMV enhancer exemplified by SEQ ID NO: 98, a CMV promoter exemplified by SEQ ID NO: 99, optionally a cloning site exemplified by SEQ ID NO: 161, a hKCNQ4 codon optimized coding sequence exemplified by SEQ ID NO: 10, optionally a cloning site exemplified by SEQ ID NO: 165, a 3xFlag tag sequence exemplified by SEQ ID NO: 145, optionally a cloning site exemplified by SEQ ID NO: 162, a T2A sequence exemplified by SEQ ID NO: 141, a mScarlet coding region exemplified by SEQ ID NO: 146, optionally a cloning site exemplified by SEQ ID NO: 166, a bGHpoly(a) signal exemplified by SEQ ID NO: 36, optionally a cloning site exemplified by SEQ ID NO: 159, and a 3′ ITR exemplified by SEQ ID NO: 20.

[0333] In one embodiment, an exemplary construct comprises: a 5′ ITR exemplified by SEQ ID NO: 19, optionally a cloning site exemplified by SEQ ID NO: 160, a CMV enhancer exemplified by SEQ ID NO: 98, a CMV promoter exemplified by SEQ ID NO: 100, optionally a cloning site exemplified by SEQ ID NO: 161, a hKCNQ4 codon optimized coding sequence exemplified by SEQ ID NO: 9, optionally a cloning site exemplified by SEQ ID NO: 166, a bGHpoly(a) signal exemplified by SEQ ID NO: 36, optionally a cloning site exemplified by SEQ ID NO: 164, a U6 promoter sequence exemplified by SEQ ID NO: 144, a guide RNA sequence exemplified by SEQ ID NO: 42, a tcrRNA sequence exemplified by SEQ ID NO: 147, a Pol III transcription termination sequence exemplified by SEQ ID NO: 149, optionally a cloning site exemplified by SEQ ID NO: 167, and a 3′ ITR exemplified by SEQ ID NO: 20.

[0334] In one embodiment, an exemplary construct comprises: a 5′ ITR exemplified by SEQ ID NO: 19, optionally a cloning site exemplified by SEQ ID NO: 160, a CMV enhancer exemplified by SEQ ID NO: 98, a CMV promoter exemplified by SEQ ID NO: 100, optionally a cloning site exemplified by SEQ ID NO: 161, a hKCNQ4 codon optimized coding sequence exemplified by SEQ ID NO: 9, optionally a cloning site exemplified by SEQ ID NO: 166, a bGHpoly(a) signal exemplified by SEQ ID NO: 36, optionally a cloning site exemplified by SEQ ID NO: 164, a U6 promoter sequence exemplified by SEQ ID NO: 144, a guide RNA sequence exemplified by SEQ ID NO: 43, a tcrRNA sequence exemplified by SEQ ID NO: 147, a Pol III transcription termination sequence exemplified by SEQ ID NO: 149, optionally a cloning site exemplified by SEQ ID NO: 167, and a 3′ ITR exemplified by SEQ ID NO: 20

[0335] In one embodiment, an exemplary construct comprises: a 5′ ITR exemplified by SEQ ID NO: 19, optionally a cloning site exemplified by SEQ ID NO: 160, a CMV enhancer exemplified by SEQ ID NO: 98, a CMV promoter exemplified by SEQ ID NO: 100, optionally a cloning site exemplified by SEQ ID NO: 161, a hKCNQ4 codon optimized coding sequence exemplified by SEQ ID NO: 9, optionally a cloning site exemplified by SEQ ID NO: 166, a bGHpoly(a) signal exemplified by SEQ ID NO: 36, optionally a cloning site exemplified by SEQ ID NO: 164, a U6 promoter sequence exemplified by SEQ ID NO: 144, a guide RNA sequence exemplified by SEQ ID NO: 150, a tcrRNA sequence exemplified by SEQ ID NO: 147, a Pol III transcription termination sequence exemplified by SEQ ID NO: 149, optionally a cloning site exemplified by SEQ ID NO: 167, and a 3′ ITR exemplified by SEQ ID NO: 20

### Four (4) Cas9 Construct Sequences

[0336] In one embodiment, an exemplary construct comprises: a 5′ ITR exemplified by SEQ ID NO: 19, optionally a cloning site exemplified by SEQ ID NO: 155, a CMV enhancer exemplified by SEQ ID NO: 98, a CMV promoter exemplified by SEQ ID NO: 99, optionally a cloning site exemplified by SEQ ID NO: 161, an SV40 nuclear localization signal exemplified by SEQ ID NO: 151, optionally a cloning site exemplified by SEQ ID NO: 168, a catalytically-inactive saCas9 coding sequence exemplified by SEQ ID NO: 152, optionally a cloning site exemplified by SEQ ID NO: 169, an SV40 nuclear localization signal exemplified by SEQ ID NO: 153, optionally a cloning site exemplified by SEQ ID NO: 166, an SV40 poly(A) signal sequence exemplified by SEQ ID NO: 143, optionally a cloning site exemplified by SEQ ID NO: 159, and a 3′ ITR exemplified by SEQ ID NO: 20.

[0337] In one embodiment, an exemplary construct comprises: a 5′ ITR exemplified by SEQ ID NO: 19, optionally a cloning site exemplified by SEQ ID NO: 155, a CMV promoter exemplified by SEQ ID NO: 99, optionally a cloning site exemplified by SEQ ID NO: 161, an SV40 nuclear localization signal exemplified by SEQ ID NO: 151, optionally a cloning site exemplified by SEQ ID NO: 168, a catalytically-inactive saCas9 coding sequence exemplified by SEQ ID NO: 152, optionally a cloning site exemplified by SEQ ID NO: 169, an SV40 nuclear localization signal exemplified by SEQ ID NO: 153, optionally a cloning site exemplified by SEQ ID NO: 166, an SV40 poly(A) signal sequence exemplified by SEQ ID NO: 143, optionally a cloning site exemplified by SEQ ID NO: 159, and a 3′ ITR exemplified by SEQ ID NO: 20.

[0338] In one embodiment, an exemplary construct comprises: a 5′ ITR exemplified by SEQ ID NO: 19, optionally a cloning site exemplified by SEQ ID NO: 155, a CMV enhancer exemplified by SEQ ID NO: 98, a CMV promoter exemplified by SEQ ID NO: 99, optionally a cloning site exemplified by SEQ ID NO: 161, an SV40 nuclear localization signal exemplified by SEQ ID NO: 151, optionally a cloning site exemplified by SEQ ID NO: 168, a catalytically active saCas9 coding sequence exemplified by SEQ ID NO: 154, optionally a cloning site exemplified by SEQ ID NO: 169, an SV40 nuclear localization signal exemplified by SEQ ID NO: 153, optionally a cloning site exemplified by SEQ ID NO: 166, an SV40 poly(A) signal sequence exemplified by SEQ ID NO: 143, optionally a cloning site exemplified by SEQ ID NO: 159, and a 3′ ITR exemplified by SEQ ID NO: 20.

[0339] In one embodiment, an exemplary construct comprises: a 5′ ITR exemplified by SEQ ID NO: 19, optionally a cloning site exemplified by SEQ ID NO: 155, a CMV promoter exemplified by SEQ ID NO: 99, optionally a cloning site exemplified by SEQ ID NO: 161, an SV40 nuclear localization signal exemplified by SEQ ID NO: 151, optionally a cloning site exemplified by SEQ ID NO: 168, a catalytically saCas9 coding sequence exemplified by SEQ ID NO: 154, optionally a cloning site exemplified by SEQ ID NO: 169, an SV40 nuclear localization signal exemplified by SEQ ID NO: 153, optionally a cloning site exemplified by SEQ ID NO: 166, an SV40 poly(A) signal sequence exemplified by SEQ ID NO: 143, optionally a cloning site exemplified by SEQ ID NO: 159, and a 3′ ITR exemplified by SEQ ID NO: 20.

Eight (8) Cas9 with eGFP and sgRNA Construct Sequences

[0340] In one embodiment, an exemplary construct comprises: a 5′ ITR exemplified by SEQ ID NO: 19, optionally a cloning site exemplified by SEQ ID NO: 160, a CMV enhancer exemplified by SEQ ID NO: 98, a CMV promoter exemplified by SEQ ID NO: 99, optionally a cloning site exemplified by SEQ ID NO: 161, an SV40 nuclear localization signal exemplified by SEQ ID NO: 151, optionally a cloning site exemplified by SEQ ID NO: 168, a catalytically active saCas9 coding sequence exemplified by SEQ ID NO: 154, optionally a cloning site exemplified by SEQ ID NO: 169, an SV40 nuclear localization signal exemplified by SEQ ID NO: 153, optionally a cloning site exemplified by SEQ ID NO: 162, a T2A sequence exemplified by SEQ ID NO: 141, a turboGFP sequence exemplified by SEQ ID NO: 142, optionally a cloning site exemplified by SEQ ID NO: 158, a SV-40 poly(A) signal sequence exemplified by SEQ ID NO: 143, optionally a cloning site exemplified by SEQ ID NO: 164, a U6 promoter sequence exemplified by SEQ ID NO: 144, a guide RNA sequence exemplified by SEQ ID NO: 43, a tcrRNA sequence exemplified by SEQ ID NO: 147, a Pol III transcription termination sequence exemplified by SEQ ID NO: 149, optionally a cloning site exemplified by SEQ ID NO: 170, and a 3′ ITR exemplified by SEQ ID NO: 20.

[0341] In one embodiment, an exemplary construct comprises: a 5′ ITR exemplified by SEQ ID NO: 19, optionally a cloning site exemplified by SEQ ID NO: 160, a CMV enhancer exemplified by SEQ ID NO: 98, a CMV promoter exemplified by SEQ ID NO: 99, optionally a cloning site exemplified by SEQ ID NO: 161, an SV40 nuclear localization signal exemplified by SEQ ID NO: 151, optionally a cloning site exemplified by SEQ ID NO: 168, a catalytically-inactive saCas9 coding sequence exemplified by SEQ ID NO: 152, optionally a cloning site exemplified by SEQ ID NO: 169, an SV40 nuclear localization signal exemplified by SEQ ID NO: 153, optionally a cloning site exemplified by SEQ ID NO: 162, a T2A sequence exemplified by SEQ ID NO: 141, a turboGFP sequence exemplified by SEQ ID NO: 142, optionally a cloning site exemplified by SEQ ID NO: 158, a SV-40 poly(A) signal sequence exemplified by SEQ ID NO: 143, optionally a cloning site exemplified by SEQ ID NO: 164, a U6 promoter sequence exemplified by SEQ ID NO: 144, a guide RNA sequence exemplified by SEQ ID NO: 43, a tcrRNA sequence exemplified by SEQ ID NO: 147, a Pol III transcription termination sequence exemplified by SEQ ID NO: 149, optionally a cloning site exemplified by SEQ ID NO: 170, and a 3′ ITR exemplified by SEQ ID NO: 20.

[0342] In one embodiment, an exemplary construct comprises: a 5′ ITR exemplified by SEQ ID NO: 19, optionally a cloning site exemplified by SEQ ID NO: 160, a CMV enhancer exemplified by SEQ ID NO: 98, a CMV promoter exemplified by SEQ ID NO: 99, optionally a cloning site exemplified by SEQ ID NO: 161, an SV40 nuclear localization signal exemplified by SEQ ID NO: 151, optionally a cloning site exemplified by SEQ ID NO: 168, a catalytically active saCas9 coding sequence exemplified by SEQ ID NO: 154, optionally a cloning site exemplified by SEQ ID NO: 169, an SV40 nuclear localization signal exemplified by SEQ ID NO: 153, optionally a cloning site exemplified by SEQ ID NO: 162, a T2A sequence exemplified by SEQ ID NO: 141, a turboGFP sequence exemplified by SEQ ID NO: 142, optionally a cloning site exemplified by SEQ ID NO: 158, a SV-40 poly(A) signal sequence exemplified by SEQ ID NO: 143, optionally a cloning site exemplified by SEQ ID NO: 164, a U6 promoter sequence exemplified by SEQ ID NO: 144, a guide RNA sequence exemplified by SEQ ID NO: 42, a tcrRNA sequence exemplified by SEQ ID NO: 147, a Pol III transcription termination sequence exemplified by SEQ ID NO: 149, optionally a cloning site exemplified by SEQ ID NO: 170, and a 3′ ITR exemplified by SEQ ID NO: 20.

[0343] In one embodiment, an exemplary construct comprises: a 5′ ITR exemplified by SEQ ID NO: 19, optionally a cloning site exemplified by SEQ ID NO: 160, a CMV enhancer exemplified by SEQ ID NO: 98, a CMV promoter exemplified by SEQ ID NO: 99, optionally a cloning site exemplified by SEQ ID NO: 161, an SV40 nuclear localization signal exemplified by SEQ ID NO: 151, optionally a cloning site exemplified by SEQ ID NO: 168, a catalytically-inactive saCas9 coding sequence exemplified by SEQ ID NO: 152, optionally a cloning site exemplified by SEQ ID NO: 169, an SV40 nuclear localization signal exemplified by SEQ ID NO: 153, optionally a cloning site exemplified by SEQ ID NO: 162, a T2A sequence exemplified by SEQ ID NO: 141, a turboGFP sequence exemplified by SEQ ID NO: 142, optionally a cloning site exemplified by SEQ ID NO: 158, a SV-40 poly(A) signal sequence exemplified by SEQ ID NO: 143, optionally a cloning site exemplified by SEQ ID NO: 164, a U6 promoter sequence exemplified by SEQ ID NO: 144, a guide RNA sequence exemplified by SEQ ID NO: 42, a tcrRNA sequence exemplified by SEQ ID NO: 147, a Pol III transcription termination sequence exemplified by SEQ ID NO: 149, optionally a cloning site exemplified by SEQ ID NO: 170, and a 3′ ITR exemplified by SEQ ID NO: 20.

[0344] In one embodiment, an exemplary construct comprises: a 5′ ITR exemplified by SEQ ID NO: 19, optionally a cloning site exemplified by SEQ ID NO: 160, a CMV enhancer exemplified by SEQ ID NO: 98, a CMV promoter exemplified by SEQ ID NO: 99, optionally a cloning site exemplified by SEQ ID NO: 161, an SV40 nuclear localization signal exemplified by SEQ ID NO: 151, optionally a cloning site exemplified by SEQ ID NO: 168, a catalytically active saCas9 coding sequence exemplified by SEQ ID NO: 154, optionally a cloning site exemplified by SEQ ID NO: 169, an SV40 nuclear localization signal exemplified by SEQ ID NO: 153, optionally a cloning site exemplified by SEQ ID NO: 162, a T2A sequence exemplified by SEQ ID NO: 141, a turboGFP sequence exemplified by SEQ ID NO: 142, optionally a cloning site exemplified by SEQ ID NO: 158, a SV-40 poly(A) signal sequence exemplified by SEQ ID NO: 143, optionally a cloning site exemplified by SEQ ID NO: 164, a U6 promoter sequence exemplified by SEQ ID NO: 144, a guide RNA sequence exemplified by SEQ ID NO: 44, a tcrRNA sequence exemplified by SEQ ID NO: 147, a Pol III transcription termination sequence exemplified by SEQ ID NO: 149, optionally a cloning site exemplified by SEQ ID NO: 170, and a 3′ ITR exemplified by SEQ ID NO: 20.

[0345] In one embodiment, an exemplary construct comprises: a 5′ ITR exemplified by SEQ ID NO: 19, optionally a cloning site exemplified by SEQ ID NO: 160, a CMV enhancer exemplified by SEQ ID NO: 98, a CMV promoter exemplified by SEQ ID NO: 99, optionally a cloning site exemplified by SEQ ID NO: 161, an SV40 nuclear localization signal exemplified by SEQ ID NO: 151, optionally a cloning site exemplified by SEQ ID NO: 168, a catalytically active saCas9 coding sequence exemplified by SEQ ID NO: 154, optionally a cloning site exemplified by SEQ ID NO: 169, an SV40 nuclear localization signal exemplified by SEQ ID NO: 153, optionally a cloning site exemplified by SEQ ID NO: 162, a T2A sequence exemplified by SEQ ID NO: 141, a turboGFP sequence exemplified by SEQ ID NO: 142, optionally a cloning site exemplified by SEQ ID NO: 158, a SV-40 poly(A) signal sequence exemplified by SEQ ID NO: 143, optionally a cloning site exemplified by SEQ ID NO: 164, a U6 promoter sequence exemplified by SEQ ID NO: 144, a guide RNA sequence exemplified by SEQ ID NO: 45, a tcrRNA sequence exemplified by SEQ ID NO: 147, a Pol III transcription termination sequence exemplified by SEQ ID NO: 149, optionally a cloning site exemplified by SEQ ID NO: 170, and a 3′ ITR exemplified by SEQ ID NO: 20.

[0346] In one embodiment, an exemplary construct comprises: a 5′ ITR exemplified by SEQ ID NO: 19, optionally a cloning site exemplified by SEQ ID NO: 160, a CMV enhancer exemplified by SEQ ID NO: 98, a CMV promoter exemplified by SEQ ID NO: 99, optionally a cloning site exemplified by SEQ ID NO: 161, an SV40 nuclear localization signal exemplified by SEQ ID NO: 151, optionally a cloning site exemplified by SEQ ID NO: 168, a catalytically active saCas9 coding sequence exemplified by SEQ ID NO: 154, optionally a cloning site exemplified by SEQ ID NO: 169, an SV40 nuclear localization signal exemplified by SEQ ID NO: 153, optionally a cloning site exemplified by SEQ ID NO: 162, a T2A sequence exemplified by SEQ ID NO: 141, a turboGFP sequence exemplified by SEQ ID NO: 142, optionally a cloning site exemplified by SEQ ID NO: 158, a SV-40 poly(A) signal sequence exemplified by SEQ ID NO: 143, optionally a cloning site exemplified by SEQ ID NO: 164, a U6 promoter sequence exemplified by SEQ ID NO: 144, a guide RNA sequence exemplified by SEQ ID NO: 46, a tcrRNA sequence exemplified by SEQ ID NO: 147, a Pol III transcription termination sequence exemplified by SEQ ID NO: 149, optionally a cloning site exemplified by SEQ ID NO: 170, and a 3′ ITR exemplified by SEQ ID NO: 20.

[0347] In one embodiment, an exemplary construct comprises: a 5′ ITR exemplified by SEQ ID NO: 19, optionally a cloning site exemplified by SEQ ID NO: 160, a CMV enhancer exemplified by SEQ ID NO: 98, a CMV promoter exemplified by SEQ ID NO: 99, optionally a cloning site exemplified by SEQ ID NO: 161, an SV40 nuclear localization signal exemplified by SEQ ID NO: 151, optionally a cloning site exemplified by SEQ ID NO: 168, a catalytically active saCas9 coding sequence exemplified by SEQ ID NO: 154, optionally a cloning site exemplified by SEQ ID NO: 169, an SV40 nuclear localization signal exemplified by SEQ ID NO: 153, optionally a cloning site exemplified by SEQ ID NO: 162, a T2A sequence exemplified by SEQ ID NO: 141, a turboGFP sequence exemplified by SEQ ID NO: 142, optionally a cloning site exemplified by SEQ ID NO: 158, a SV-40 poly(A) signal sequence exemplified by SEQ ID NO: 143, optionally a cloning site exemplified by SEQ ID NO: 164, a U6 promoter sequence exemplified by SEQ ID NO: 144, a guide RNA sequence exemplified by SEQ ID NO: 47, a tcrRNA sequence exemplified by SEQ ID NO: 147, a Pol III transcription termination sequence exemplified by SEQ ID NO: 149, optionally a cloning site exemplified by SEQ ID NO: 170, and a 3′ ITR exemplified by SEQ ID NO: 20.

Three (3) eGFP and sgRNA Construct Sequences

[0348] In one embodiment, an exemplary construct comprises: a 5′ ITR exemplified by SEQ ID NO: 19, optionally a cloning site exemplified by SEQ ID NO: 160, a CMV enhancer exemplified by SEQ ID NO: 98, a CMV promoter exemplified by SEQ ID NO: 100, optionally a cloning site exemplified by SEQ ID NO: 161, a turboGFP coding sequence exemplified by SEQ ID NO: 142, optionally a cloning site exemplified by SEQ ID NO: 166, a bGHpoly(a) signal exemplified by SEQ ID NO: 36, optionally a cloning site exemplified by SEQ ID NO: 164, a U6 promoter sequence exemplified by SEQ ID NO: 144, a guide RNA sequence exemplified by SEQ ID NO: 42, a tcrRNA sequence exemplified by SEQ ID NO: 147, a Pol III transcription termination sequence exemplified by SEQ ID NO: 149, optionally a cloning site exemplified by SEQ ID NO: 167, and a 3′ ITR exemplified by SEQ ID NO: 20

[0349] In one embodiment, an exemplary construct comprises: a 5′ ITR exemplified by SEQ ID NO: 19, optionally a cloning site exemplified by SEQ ID NO: 160, a CMV enhancer exemplified by SEQ ID NO: 98, a CMV promoter exemplified by SEQ ID NO: 100, optionally a cloning site exemplified by SEQ ID NO: 161, a turboGFP coding sequence exemplified by SEQ ID NO: 142, optionally a cloning site exemplified by SEQ ID NO: 166, a bGHpoly(a) signal exemplified by SEQ ID NO: 36, optionally a cloning site exemplified by SEQ ID NO: 164, a U6 promoter sequence exemplified by SEQ ID NO: 144, a guide RNA sequence exemplified by SEQ ID NO: 43, a tcrRNA sequence exemplified by SEQ ID NO: 147, a Pol III transcription termination sequence exemplified by SEQ ID NO: 149, optionally a cloning site exemplified by SEQ ID NO: 167, and a 3′ ITR exemplified by SEQ ID NO: 20

[0350] In one embodiment, an exemplary construct comprises: a 5′ ITR exemplified by SEQ ID NO: 19, optionally a cloning site exemplified by SEQ ID NO: 160, a CMV enhancer exemplified by SEQ ID NO: 98, a CMV promoter exemplified by SEQ ID NO: 100, optionally a cloning site exemplified by SEQ ID NO: 161, a turboGFP coding sequence exemplified by SEQ ID NO: 142, optionally a cloning site exemplified by SEQ ID NO: 166, a bGHpoly(a) signal exemplified by SEQ ID NO: 36, optionally a cloning site exemplified by SEQ ID NO: 164, a U6 promoter sequence exemplified by SEQ ID NO: 144, a guide RNA sequence exemplified by SEQ ID NO: 150, a tcrRNA sequence exemplified by SEQ ID NO: 147, a Pol III transcription termination sequence exemplified by SEQ ID NO: 149, optionally a cloning site exemplified by SEQ ID NO: 167, and a 3′ ITR exemplified by SEQ ID NO: 20.

Ten (10) miRNA Construct Sequences Comprising Mouse KCNQ4 Targeting Sequences

[0351] In one embodiment, an exemplary construct comprises: a 5′ ITR exemplified by SEQ ID NO: 19, optionally a cloning site exemplified by SEQ ID NO: 155, a CMV enhancer exemplified by SEQ ID NO: 22, a CBA promoter exemplified by SEQ ID NO: 101, a chimeric intron exemplified by SEQ ID NO: 102 with a human microRNA backbone and mouse KCNQ4 targeting sequence exemplified by SEQ ID NO: 135 engineered into the chimeric intron, optionally a cloning site exemplified by SEQ ID NO: 156, an eGFP coding region exemplified by SEQ ID NO: 103, optionally a cloning site exemplified by SEQ ID NO: 157, a microRNA backbone and KCNQ4 targeting sequence exemplified by SEQ ID NO: 135, optionally a cloning site exemplified by SEQ ID NO: 158, a polyA site exemplified by SEQ ID NO: 36, optionally a cloning site exemplified by SEQ ID NO: 159, and a 3′ ITR exemplified by SEQ ID NO: 20.

[0352] In one embodiment, an exemplary construct comprises: a 5′ ITR exemplified by SEQ ID NO: 19, optionally a cloning site exemplified by SEQ ID NO: 155, a CMV enhancer exemplified by SEQ ID NO: 22, a CBA promoter exemplified by SEQ ID NO: 101, a chimeric intron exemplified by SEQ ID NO: 102 with a human microRNA backbone and mouse KCNQ4 targeting sequence exemplified by SEQ ID NO: 135 engineered into the chimeric intron, optionally a cloning site exemplified by SEQ ID NO: 156, an KCNQ4 coding region exemplified by SEQ ID NO: 10, optionally a cloning site exemplified by SEQ ID NO: 157, a microRNA backbone and KCNQ4 targeting sequence exemplified by SEQ ID NO: 135, optionally a cloning site exemplified by SEQ ID NO: 158, a polyA site exemplified by SEQ ID NO: 36, optionally a cloning site exemplified by SEQ ID NO: 159, and a 3′ ITR exemplified by SEQ ID NO: 20.

[0353] In one embodiment, an exemplary construct comprises: a 5′ ITR exemplified by SEQ ID NO: 19, optionally a cloning site exemplified by SEQ ID NO: 155, a CMV enhancer exemplified by SEQ ID NO: 22, a CBA promoter exemplified by SEQ ID NO: 101, a chimeric intron exemplified by SEQ ID NO: 102 with a human microRNA backbone and mouse KCNQ4 targeting sequence exemplified by SEQ ID NO: 136 engineered into the chimeric intron, optionally a cloning site exemplified by SEQ ID NO: 156, an eGFP coding region exemplified by SEQ ID NO: 103, optionally a cloning site exemplified by SEQ ID NO: 157, a microRNA backbone and KCNQ4 targeting sequence exemplified by SEQ ID NO: 135, optionally a cloning site exemplified by SEQ ID NO: 158, a polyA site exemplified by SEQ ID NO: 36, optionally a cloning site exemplified by SEQ ID NO: 159, and a 3′ ITR exemplified by SEQ ID NO: 20.

[0354] In one embodiment, an exemplary construct comprises: a 5′ ITR exemplified by SEQ ID NO: 19, optionally a cloning site exemplified by SEQ ID NO: 155, a CMV enhancer exemplified by SEQ ID NO: 22, a CBA promoter exemplified by SEQ ID NO: 101, a chimeric intron exemplified by SEQ ID NO: 102 with a human microRNA backbone and mouse KCNQ4 targeting sequence exemplified by SEQ ID NO: 136 engineered into the chimeric intron, optionally a cloning site exemplified by SEQ ID NO: 156, an KCNQ4 coding region exemplified by SEQ ID NO: 10, optionally a cloning site exemplified by SEQ ID NO: 157, a microRNA backbone and KCNQ4 targeting sequence exemplified by SEQ ID NO: 135, optionally a cloning site exemplified by SEQ ID NO: 158, a polyA site exemplified by SEQ ID NO: 36, optionally a cloning site exemplified by SEQ ID NO: 159, and a 3′ ITR exemplified by SEQ ID NO: 20.

[0355] In one embodiment, an exemplary construct comprises: a 5′ ITR exemplified by SEQ ID NO: 19, optionally a cloning site exemplified by SEQ ID NO: 155, a CMV enhancer exemplified by SEQ ID NO: 22, a CBA promoter exemplified by SEQ ID NO: 101, a chimeric intron exemplified by SEQ ID NO: 102 with a human microRNA backbone and mouse KCNQ4 targeting sequence exemplified by SEQ ID NO: 137 engineered into the chimeric intron, optionally a cloning site exemplified by SEQ ID NO: 156, an eGFP coding region exemplified by SEQ ID NO: 103, optionally a cloning site exemplified by SEQ ID NO: 157, a microRNA backbone and KCNQ4 targeting sequence exemplified by SEQ ID NO: 135, optionally a cloning site exemplified by SEQ ID NO: 158, a polyA site exemplified by SEQ ID NO: 36, optionally a cloning site exemplified by SEQ ID NO: 159, and a 3′ ITR exemplified by SEQ ID NO: 20.

[0356] In one embodiment, an exemplary construct comprises: a 5′ ITR exemplified by SEQ ID NO: 19, optionally a cloning site exemplified by SEQ ID NO: 155, a CMV enhancer exemplified by SEQ ID NO: 22, a CBA promoter exemplified by SEQ ID NO: 101, a chimeric intron exemplified by SEQ ID NO: 102 with a human microRNA backbone and mouse KCNQ4 targeting sequence exemplified by SEQ ID NO: 137 engineered into the chimeric intron, optionally a cloning site exemplified by SEQ ID NO: 156, an KCNQ4 coding region exemplified by SEQ ID NO: 10, optionally a cloning site exemplified by SEQ ID NO: 157, a microRNA backbone and KCNQ4 targeting sequence exemplified by SEQ ID NO: 135, optionally a cloning site exemplified by SEQ ID NO: 158, a polyA site exemplified by SEQ ID NO: 36, optionally a cloning site exemplified by SEQ ID NO: 159, and a 3′ ITR exemplified by SEQ ID NO: 20.

[0357] In one embodiment, an exemplary construct comprises: a 5′ ITR exemplified by SEQ ID NO: 19, optionally a cloning site exemplified by SEQ ID NO: 155, a CMV enhancer exemplified by SEQ ID NO: 22, a CBA promoter exemplified by SEQ ID NO: 101, a chimeric intron exemplified by SEQ ID NO: 102 with a human microRNA backbone and mouse KCNQ4 targeting sequence exemplified by SEQ ID NO: 136 engineered into the chimeric intron, optionally a cloning site exemplified by SEQ ID NO: 156, an eGFP coding region exemplified by SEQ ID NO: 103, optionally a cloning site exemplified by SEQ ID NO: 157, three copies of microRNA backbone and KCNQ4 targeting sequence exemplified by SEQ ID NO: 138, optionally a cloning site exemplified by SEQ ID NO: 158, a polyA site exemplified by SEQ ID NO: 36, optionally a cloning site exemplified by SEQ ID NO: 159, and a 3′ ITR exemplified by SEQ ID NO: 18.

[0358] In one embodiment, an exemplary construct comprises: a 5′ ITR exemplified by SEQ ID NO: 19, optionally a cloning site exemplified by SEQ ID NO: 155, a CMV enhancer exemplified by SEQ ID NO: 22, a CBA promoter exemplified by SEQ ID NO: 101, a chimeric intron exemplified by SEQ ID NO: 102 with three copies of human microRNA backbone and mouse KCNQ4 targeting sequence exemplified by SEQ ID NO: 139 engineered into the chimeric intron, optionally a cloning site exemplified by SEQ ID NO: 156, an eGFP coding region exemplified by SEQ ID NO: 103, optionally a cloning site exemplified by SEQ ID NO: 157, three copies of microRNA backbone and KCNQ4 targeting sequence exemplified by SEQ ID NO: 138, optionally a cloning site exemplified by SEQ ID NO: 158, a polyA site exemplified by SEQ ID NO: 36, optionally a cloning site exemplified by SEQ ID NO: 159, and a 3′ ITR exemplified by SEQ ID NO: 18.

[0359] In one embodiment, an exemplary construct comprises: a 5′ ITR exemplified by SEQ ID NO: 19, optionally a cloning site exemplified by SEQ ID NO: 155, a CMV enhancer exemplified by SEQ ID NO: 22, a CBA promoter exemplified by SEQ ID NO: 101, a chimeric intron exemplified by SEQ ID NO: 102 with a human microRNA backbone and mouse KCNQ4 targeting sequence exemplified by SEQ ID NO: 136 engineered into the chimeric intron, optionally a cloning site exemplified by SEQ ID NO: 156, an KCNQ4 coding region exemplified by SEQ ID NO: 10, optionally a cloning site exemplified by SEQ ID NO: 157, three copies of microRNA backbone and KCNQ4 targeting sequence exemplified by SEQ ID NO: 138, optionally a cloning site exemplified by SEQ ID NO: 158, a polyA site exemplified by SEQ ID NO: 36, optionally a cloning site exemplified by SEQ ID NO: 159, and a 3′ ITR exemplified by SEQ ID NO: 18.

[0360] In one embodiment, an exemplary construct comprises: a 5′ ITR exemplified by SEQ ID NO: 19, optionally a cloning site exemplified by SEQ ID NO: 155, a CMV enhancer exemplified by SEQ ID NO: 22, a CBA promoter exemplified by SEQ ID NO: 101, a chimeric intron exemplified by SEQ ID NO: 102 with three copies of human microRNA backbone and mouse KCNQ4 targeting sequence exemplified by SEQ ID NO: 139 engineered into the chimeric intron, optionally a cloning site exemplified by SEQ ID NO: 156, an KCNQ4 coding region exemplified by SEQ ID NO: 10, optionally a cloning site exemplified by SEQ ID NO: 157, three copies of microRNA backbone and KCNQ4 targeting sequence exemplified by SEQ ID NO: 138, optionally a cloning site exemplified by SEQ ID NO: 158, a polyA site exemplified by SEQ ID NO: 36, optionally a cloning site exemplified by SEQ ID NO: 159, and a 3′ ITR exemplified by SEQ ID NO: 18.

Two (2) Codon Optimized KCNQ4 with sgRNA Construct Sequences

[0361] In one embodiment, an exemplary construct comprises: a 5′ ITR exemplified by SEQ ID NO: 19, optionally a cloning site exemplified by SEQ ID NO: 155, a CMV enhancer exemplified by SEQ ID NO: 22, a chicken B-actin promoter exemplified by SEQ ID NO: 101, a chimeric intron exemplified by SEQ ID NO: 24, optionally a cloning site exemplified by SEQ ID NO: 156, an KCNQ4 coding region exemplified by SEQ ID NO: 9, optionally a cloning site exemplified by SEQ ID NO: 221, a bGH poly(A) signal exemplified by SEQ ID NO: 36, a U6 promoter sequence exemplified by SEQ ID NO: 144, a guide RNA sequence exemplified by SEQ ID NO: 42, a tracrRNA sequence exemplified by SEQ ID NO: 147, a Pol III transcription termination sequence exemplified by SEQ ID NO: 149, and a 3′ ITR exemplified by SEQ ID NO: 20.

[0362] In one embodiment, an exemplary construct comprises: a 5′ ITR exemplified by SEQ ID NO: 19, optionally a cloning site exemplified by SEQ ID NO: 155, a CMV enhancer exemplified by SEQ ID NO: 22, a chicken B-actin promoter exemplified by SEQ ID NO: 101, a chimeric intron exemplified by SEQ ID NO: 24, optionally a cloning site exemplified by SEQ ID NO: 156, an KCNQ4 coding region exemplified by SEQ ID NO: 9, optionally a cloning site exemplified by SEQ ID NO: 221, a bGH poly(A) signal coding region exemplified by SEQ ID NO: 36, a U6 promoter sequence exemplified by SEQ ID NO: 144, a guide RNA sequence exemplified by SEQ ID NO: 150, a tracrRNA sequence exemplified by SEQ ID NO: 147, a Pol III transcription termination sequence exemplified by SEQ ID NO: 149, and a 3′ ITR exemplified by SEQ ID NO: 20.

[0363] Exemplary Construct Component Sequences

Exemplary AAV 5′ ITR sequence
(SEQ ID NO: 19)
CTGCGCGCTCGCTCGCTCACTGAGGCCGCCCGGGCGTCGGGCGACCTTTGGTCGCCCGGCCTCA
GTGAGCGAGCGAGCGCGCAGAGAGGGAGTGGCCAACTCCATCACTAGGGGTTCCT
Exemplary AAV 3′ ITR sequence
(SEQ ID NO: 20)
AGGAACCCCTAGTGATGGAGTTGGCCACTCCCTCTCTGCGCGCTCGCTCGCTCACTGAGGCCGG
GCGACCAAAGGTCGCCCGACGCCCGGGCTTTGCCCGGGCGGCCTCAGTGAGCGAGCGAGCGCGC
AG
Exemplary CMV Enhancer sequence
(SEQ ID NO: 22)
GAGATTGATTATTGAGTAGTTATTAATAGTAATCAATTACGGGGTCATTAGTTCATAGCCCATA
TATGGAGTTCCGCGTTACATAACTTACGGTAAATGGCCCGCCTGGCTGACCGCCCAACGACCCC
CGCCCATTGAGGTCAATAATGAGGTATGTTCCCATAGTAACGCCAATAGGGAGTTTCCATTGAG
GTCAATGGGTGGACTATTTACGGTAAACTGCCCACTTGGCAGTACATCAAGTGTATCATATGCC
AAGTACGCCCCCTATTGACGTCAATGACGGTAAATGGCCCGCCTGGCATTATGCCCAGTACATG
ACCTTATGGGACTTTCCTACTTGGCAGTACATCTACGTATTAGTCATCGCTATTACCATGG
Exemplary CMV Enhancer sequence
(SEQ ID NO: 98)
CGTTACATAACTTACGGTAAATGGCCCGCCTGGCTGACCGCCCAACGACCCCCGCCCATTGACG
TCAATAATGACGTATGTTCCCATAGTAACGCCAATAGGGACTTTCCATTGACGTCAATGGGTGG
AGTATTTACGGTAAACTGCCCACTTGGCAGTACATCAAGTGTATCATATGCCAAGTACGCCCCC
TATTGACGTCAATGACGGTAAATGGCCCGCCTGGCATTATGCCCAGTACATGACCTTATGGGAC
TTTCCTACTTGGGAGTAGATCTAGGTATTAGTCATCGCTATTAGCATG
Exemplary CMV Promoter sequence
(SEQ ID NO: 99)
GTGATGCGGTTTTGGCAGTACATCAATGGGCGTGGATAGCGGTTTGACTCACGGGGATTTCCAA
GTCTCCACCCCATTGACGTCAATGGGAGTTTGTTTTGGCACCAAAATCAACGGGACTTTCCAAA
ATGTCGTAACAACTCCGCCCCATTGACGCAAATGGGCGGTAGGCGTGTACGGTGGGAGGTCTAT
ATAAGCAGAGCTCGTTTAGTGAACCGT
Exemplary CMV Promoter sequence
(SEQ ID NO: 100)
GTGATGCGGTTTTGGCAGTACATCAATGGGCGTGGATAGCGGTTTGACTCACGGGGATTTCCAA
GTCTCCACCCCATTGACGTCAATGGGAGTTTGTTTTGGCACCAAAATCAACGGGACTTTCCAAA
ATGTCGTAACAACTCCGCCCCATTGACGCAAATGGGCGGTAGGCGTGTACGGTGGGAGGTCTAT
ATAAGCAGAGCTCGTTTAGTGAACCGTCGTTTAGTGAACCGT
Exemplary Chicken B-actin promoter sequence
(SEQ ID NO: 101)
GTCGAGGTGAGCCCCACGTTCTGCTTCACTCTCCCCATCTCCCCCCCCTCCCCACCCCCAATTT
TGTATTTATTTATTTTTTAATTATTTTGTGCAGCGATGGGGGCGGGGGGGGGGGGGGCGCGCGC
CAGGCGGGGCGGGGCGGGGCGAGGGGCGGGGCGGGGCGAGGCGGAGAGGTGCGGCGGCAGCCAA
TCAGAGCGGCGCGCTCCGAAAGTTTCCTTTTATGGCGAGGCGGCGGCGGCGGCGGCCCTATAAA
AAGCGAAGCGCGCGGCGGGCG
Exemplary Chicken B-actin promoter sequence
(SEQ ID NO: 23)
GTCGAGGTGAGCCCCACGTTCTGCTTCACTCTCCCCATCTCCCCCCCCTCCCCACCCCCAATTT
TGTATTTATTTATTTTTTAATTATTTTGTGCAGCGATGGGGGCGGGGGGGGGGGGGGGGCGCGC
GCCAGGCGGGGCGGGGCGGGGCGAGGGGCGGGGCGGGGCGAGGCGGAGAGGTGCGGCGGCAGCC
AATCAGAGCGGCGCGCTCCGAAAGTTTCCTTTTATGGCGAGGCGGCGGCGGCGGCGGCCCTATA
AAAAGCGAAGCGCGCGGCGGGCG
Exemplary SV-40 chimeric intron sequence
(SEQ ID NO: 102)
GGAGTCGCTGCGTTGCCTTCGCCCCGTGCCCCGCTCCGCGCCGCCTCGCGCCGCCCGCCCCGGC
TCTGACTGACCGCGTTACTCCCACAGGTGAGCGGGCGGGACGGCCCTTCTCCTCCGGGCTGTAA
TTAGCGCTTGGTTTAATGACGGCTCGTTTCTTTTCTGTGGCTGCGTGAAAGCCTTAAAGGGCTC
CGGGAGGGCCCTTTGTGCGGGGGGGAGCGGCTCGGGGGGTGCGTGCGTGTGTGTGTGCGTGGGG
AGCGCCGCGTGCGGCCCGCGCTGCCCGGCGGCTGTGAGCGCTGCGGGCGCGGCGCGGGGCTTTG
TGCGCTCCGCGTGTGCGCGAGGGGAGCGCGGCCGGGGGCGGTGCCCCGCGGTGCGGGGGGGCTG
CGAGGGGAACAAAGGCTGCGTGCGGGGTGTGTGCGTGGGGGGGTGAGCAGGGGGTGTGGGCGCG
GCGGTCGGGCTGTAACCCCCCCCTGCACCCCCCTCCCCGAGTTGCTGAGCACGGCCCGGCTTCG
GGTGCGGGGCTCCGTGCGGGGCGTGGCGCGGGGCTCGCCGTGCCGGGCGGGGGGTGGCGGCAGG
TGGGGGTGCCGGGCGGGGCGGGGCCGCCTCGGGCCGGGGAGGGCTCGGGGGAGGGGCGCGGCGG
CCCCCGGAGCGCCGGCGTCTAGAGCCTCTGCTAACCATGTTCATGCCTTCTTCTTTTTCCTACA
G
Exemplary SV-40 chimeric intron sequence
(SEQ ID NO: 24)
GGAGTCGCTGCGTTGCCTTCGCCCCGTGCCCCGCTCCGCGCCGCCTCGCGCCGCCCGCCCCGGC
TCTGACTGACCGCGTTACTCCCACAGGTGAGCGGGCGGGACGGCCCTTCTCCTCCGGGCTGTAA
TTAGCGCTTGGTTTAATGACGGCTCGTTTCTTTTCTGTGGCTGCGTGAAAGCCTTAAAGGGCTC
CGGGAGGGCCCTTTGTGCGGGGGGGAGCGGCTCGGGGGGTGCGTGCGTGTGTGTGTGCGTGGGG
AGCGCCGCGTGCGGCCCGCGCTGCCCGGCGGCTGTGAGCGCTGCGGGCGCGGCGCGGGGCTTTG
TGCGCTCCGCGTGTGCGCGAGGGGAGCGCGGCCGGGGGCGGTGCCCCGCGGTGCGGGGGGGCTG
CGAGGGGAACAAAGGCTGCGTGCGGGGTGTGTGCGTGGGGGGGTGAGCAGGGGGTGTGGGCGCG
GCGGTCGGGCTGTAACCCCCCCCTGCACCCCCCTCCCCGAGTTGCTGAGCACGGCCCGGCTTCG
GGTGCGGGGCTCCGTGCGGGGCGTGGCGCGGGGCTCGCCGTGCCGGGCGGGGGGTGGCGGCAGG
TGGGGGTGCCGGGCGGGGCGGGGCCGCCTCGGGCCGGGGAGGGCTCGGGGGAGGGGCGCGGCGG
CCCCCGGAGCGCCGGCGGCTGTCGAGGCGCGGCGAGCCGCAGCCATTGCCTTTTATGGTAATCG
TGCGAGAGGGCGCAGGGACTTCCTTTGTCCCAAATCTGTGCGGAGCCGAAATCTGGGAGGCGCC
GCCGCACCCCCTCTAGCGGGCGCGGGGCGAAGCGGTGCGGCGCCGGCAGGAAGGAAATGGGCGG
GGAGGGCCTTCGTGCGTCGCCGCGCCGCCGTCCCCTTCTCCCTCTCCAGCCTCGGGGCTGTCCG
CGGGGGGACGGCTGCCTTCGGGGGGGACGGGGCAGGGCGGGGTTCGGCTTCTGGCGTGTGACCG
GCGGCTCTAGAGCCTCTGCTAACCATGTTCATGCCTTCTTCTTTTTCCTACAG
Exemplary EGFP sequence
(SEQ ID NO: 103)
ATGGTGAGCAAGGGCGAGGAGCTGTTCACCGGGGTGGTGCCCATCCTGGTCGAGCTGGACGGCG
ACGTAAACGGCCACAAGTTCAGCGTGTCCGGCGAGGGCGAGGGCGATGCCACCTACGGCAAGCT
GACCCTGAAGTTCATCTGCACCACCGGCAAGCTGCCCGTGCCCTGGCCCACCCTCGTGACCACC
CTGACCTACGGCGTGCAGTGCTTCAGCCGCTACCCCGACCACATGAAGCAGCACGACTTCTTCA
AGTCCGCCATGCCCGAAGGCTACGTCCAGGAGCGCACCATCTTCTTCAAGGACGACGGCAACTA
CAAGACCCGCGCCGAGGTGAAGTTCGAGGGCGACACCCTGGTGAACCGCATCGAGCTGAAGGGC
ATCGACTTCAAGGAGGACGGCAACATCCTGGGGCACAAGCTGGAGTACAACTACAACAGCCACA
ACGTCTATATCATGGCCGACAAGCAGAAGAACGGCATCAAGGTGAACTTCAAGATCCGCCACAA
CATCGAGGACGGCAGCGTGCAGCTCGCCGACCACTACCAGCAGAACACCCCCATCGGCGACGGC
CCCGTGCTGCTGCCCGACAACCACTACCTGAGCACCCAGTCCGCCCTGAGCAAAGACCCCAACG
AGAAGCGCGATCACATGGTCCTGCTGGAGTTCGTGACCGCCGCCGGGATCACTCTCGGCATGGA
CGAGCTGTACAAGTAA
Exemplary bGH poly(A) signal sequence
(SEQ ID NO: 36)
CTGTGCCTTCTAGTTGCCAGCCATCTGTTGTTTGCCCCTCCCCCGTGCCTTCCTTGACCCTGGA
AGGTGCCACTCCCACTGTCCTTTCCTAATAAAATGAGGAAATTGCATCGCATTGTCTGAGTAGG
TGTCATTCTATTCTGGGGGGTGGGGTGGGGCAGGACAGCAAGGGGGAGGATTGGGAAGACAATA
GCAGGCATGCTGGGGATGCGGTGGGCTCTATGG
Exemplary microRNA-16 backbone with KCNQ4 targeting
seq #2 sequence
(SEQ ID NO: 104)
CATAGCTCTTATGATAGCAATGTCAGCAGTGCCTTTGAGTCTCAGAGATGCCCGGGTTAAGATT
CTAAAATTATCACGGGTATTACTTGAGGCTCAGAAGTAAGGTTGACCATACTCTACAGTTGTG
Exemplary microRNA-26 backbone with KCNQ4 targeting
seq #2 sequence
(SEQ ID NO: 105)
GAGCAGGAGGACCAAGGCCCTGGCGAAGGCCGTGGCCTCGTTGAGTCTCAGAGATGCCCGGTGT
GCAGGTCCCAATGGCCGGGTATTACTGAGATTCCACGGGGACGCGGGCCTGGACGCCGGCATCC
GGGCTCAGGACCCCCCTC
Exemplary microRNA-96 backbone with KCNQ4 targeting
seq #2 sequence
(SEQ ID NO: 106)
GTGTCCCCAGAGAGCCCGCACCAGTGCCATCTGCTTGGCCGATTTGAGTCTCAGAGATGCCCgg
CTTGTGTCTCTCCGCTCTGAGCTGTCTGTCTCGAGGCTCATATGGGAAAAGCAGGACCCGCAGC
TGCGTCCGCCTCCCCTGCAT
Exemplary miRNA-16 backbone with KCNQ4 targeting
seq #4 sequence
(SEQ ID NO: 107)
CATAGCTCTTATGATAGCAATGTCAGCAGTGCCTTTCTCGAAGTGCTTCTGCCGGGTTAAGATT
CTAAAATTATCACGGTAGAAACATCTTCGGGAGAAGTAAGGTTGAGCATACTCTAGAGTTGTG
Exemplary miRNA-26 backbone with KCNQ4 targeting
seq #4 sequence
(SEQ ID NO: 108)
GAGCAGGAGGACCAAGGCCCTGGCGAAGGCCGTGGCCTCGTTCTCGAAGTGCTTCTGCCGGTGT
GCAGGTCCCAATGGCCGGTAGAATCGTTTCGAGCACGGGGACGCGGGCCTGGACGCCGGCATCC
GGGCTCAGGACCCCCCTC
Exemplary miRNA-96 backbone with KCNQ4 targeting
seq #4 sequence
(SEQ ID NO: 109)
GTGTCCCCAGAGAGCCCGCACCAGTGCCATCTGCTTGGCCGATTTCTCGAAGTGCTTCTGCCGG
CTTGTGTCTCTCCGCTCTGAGCTGTGAGGAGCTTTCGGGATATGGGAAAAGCAGGACCCGCAGC
TGCGTCCGCCTCCCCTGCAT
Exemplary miRNA-16 backbone with KCNQ4 targeting
seq #5 sequence
(SEQ ID NO: 110)
CATAGCTCTTATGATAGCAATGTCAGCAGTGCCTTTCTCCACCTTGACCACGCGTGTTAAGATT
CTAAAATTATCTCGTGTGGTAAGTGGTGGAGAGAAGTAAGGTTGACCATACTCTACAGTTGTG
Exemplary miRNA-26 backbone with KCNQ4 targeting
seq #5 sequence
(SEQ ID NO: ill)
GAGCAGGAGGACCAAGGCCCTGGCGAAGGCCGTGGCCTCGTTCTCCACCTTGACCACGCGTTGT
GCAGGTCCCAATGGGCGTGTGGTAGAGGTGGAGCACGGGGACGCGGGCCTGGACGCCGGCATCC
GGGCTCAGGACCCCCCTC
Exemplary miRNA-96 backbone with KCNQ4 targeting
seq #5 sequence
(SEQ ID NO: 112)
GTGTCCCCAGAGAGCCCGCACCAGTGCCATCTGCTTGGCCGATTTCTCCACCTTGACCACGCGT
CTTGTGTCTCTCCGCTCTGAGGTGACTGGTTGGGTGGAGATATGGGAAAAGCAGGACCCGCAGC
TGCGTCCGCCTCCCCTGCAT
Exemplary miRNA-16 backbone with KCNQ4 targeting
seq #6 sequence
(SEQ ID NO: 113)
CATAGCTCTTATGATAGCAATGTCAGCAGTGCCTATACTGTCATAGTAGTACCAGGTTAAGATT
CTAAAATTATCATGGTACTAATGTTGGGAGTGTAAGTAAGGTTGAGCATACTCTAGAGTTGTG
Exemplary miRNA-26 backbone with KCNQ4 targeting
seq #6 sequence
(SEQ ID NO: 114)
GAGCAGGAGGACCAAGGCCCTGGCGAAGGCCGTGGCCTCGATACTGTCATAGTAGTACCAGTGT
GCAGGTCCCAATGGCTGGTACTAATGTGACAGTCTCGGGGACGCGGGCCTGGACGCCGGCATCC
GGGCTCAGGACCCCCCTC
Exemplary miRNA-96 backbone with KCNQ4 targeting
seq #6 sequence
(SEQ ID NO: 115)
GTGTCCCCAGAGAGCCCGCACCAGTGCCATCTGCTTGGCCGATATACTGTCATAGTAGTACCAG
CTTGTGTCTCTCCGCTCTGAGCTGTCACTGCTTGACGGTAAATGGGAAAAGCAGGACCCGCAGC
TGCGTCCGCCTCCCCTGCAT
Exemplary miRNA-155 backbone with KCNQ4 targeting
sequence #1 sequence
(SEQ ID NO: 116)
TCCTCTGAGTGCTGAAGGCTTGCTGTAGGCTGTATGCTGTTGAGAATCCTGATGGAGCGGGTTT
TTGCCTCCAACTGACCCGCTCATAGGATTCTCAACAGTGTATGATGCCTGTTACTAGCATTCAC
ATGGA
Exemplary miRNA-155 backbone with KCNQ4 targeting
sequence #2 sequence
(SEQ ID NO: 117)
TCCTCTGAGTGCTGAAGGCTTGCTGTAGGCTGTATGCTGTTGAGTCTCAGAGATGCCCGGGTTT
TTGCCTCCAACTGACTCGGGATTCTGAGACTCAACAGTGTATGATGCCTGTTACTAGCATTCAC
ATGGA
Exemplary miRNA-155 backbone with KCNQ4 targeting
sequence #2v2 sequence
(SEQ ID NO: 118)
TCCTCTGAGTGCTGAAGGCTTGCTGTAGGCTGTATGCTGTTGAGTCTCAGAGATGCCCGGGTTT
TTGCCTCCAACTGACTCGGGATTCTGAGATTCAACAGTGTATGATGCCTGTTACTAGCATTCAC
ATGGA
Exemplary miRNA-155 backbone with KCNQ4 targeting
sequence #2v3 sequence
(SEQ ID NO: 119)
TCCTCTGAGTGCTGAAGGCTTGCTGTAGGCTGTATGCTGTTGAGTCTCAGAGATGCCCGGGTTT
TTGCCTCCAACTGACTCGGGATCCTGAGATTCAACAGTGTATGATGCCTGTTACTAGCATTCAC
ATGGA
Exemplary miRNA-155 backbone with KCNQ4 targeting
sequence #2v4 sequence
(SEQ ID NO: 120)
TCCTCTGAGTGCTGAAGGCTTGCTGTAGGCTGTATGCTGTTGAGTCTCAGAGATGCCCGGAAGT
TTGCCTCCAACTCTTTCGGGATCCTGAGATTCAACAGTGTATGATGCCTGTTACTAGCATTCAC
ATGGA
Exemplary miRNA-155 backbone with KCNQ4 targeting
sequence #4 sequence
(SEQ ID NO: 121)
TCCTCTGAGTGCTGAAGGCTTGCTGTAGGCTGTATGCTGTTCTCGAAGTGCTTCTGCCGGGTTT
TTGCCTCCAACTGACTCGGCGAATACTTCGAGAACAGTGTATGATGCCTGTTACTAGCATTCAC
ATGGA
Exemplary miRNA-155 backbone with KCNQ4 targeting
sequence #5 sequence
(SEQ ID NO: 122)
TCCTCTGAGTGCTGAAGGCTTGCTGTAGGCTGTATGCTGTTCTCCACCTTGACCACGCGTGTTT
TTGCCTCCAACTGACATGTGGGTAAGGTGGAGAACAGTGTATGATGCCTGTTACTAGCATTCAC
ATGGA
Exemplary miRNA-155 backbone with KCNQ4 targeting
sequence #6 sequence
(SEQ ID NO: 123)
TCCTCTGAGTGCTGAAGGCTTGCTGTAGGCTGTATGCTGATACTGTCATAGTAGTACCAGGTTT
TTGCCTCCAACTGACCTGGTCTATATGACAGTATCAGTGTATGATGCCTGTTACTAGCATTCAC
ATGGA
Exemplary miRNA-155 backbone with KCNQ4 targeting
sequence #7 sequence
(SEQ ID NO: 124)
TCCTCTGAGTGCTGAAGGCTTGCTGTAGGCTGTATGCTGTAGTCGGAGGTGATGTCGGGGGTTT
TTGCCTCCAACTGACTCCTGCATACCTTCGATTACAGTGTATGATGCCTGTTACTAGCATTCAC
ATGGA
Exemplary miRNA-16 backbone with KCNQ4 targeting
sequence #1 sequence
(SEQ ID NO: 125)
CATAGCTCTTATGATAGCAATGTCAGCAGTGCCTTTGAGAATCCTGATGGAGCGGGTTAAGATT
CTAAAATTATCACGCTCCATGAGTGATTCTCAGAAGTAAGGTTGAGCATACTCTAGAGTTGTG
Exemplary miRNA-26 backbone with KCNQ4 targeting
sequence #1 sequence
(SEQ ID NO: 126)
GAGCAGGAGGACCAAGGCCCTGGCGAAGGCCGTGGCCTCGTTGAGAATCCTGATGGAGCGGTGT
GCAGGTCCCAATGGCCGCTCCATAAGGATTCTCCACGGGGACGCGGGCCTGGACGCCGGCATCC
GGGCTCAGGACCCCCCTC
Exemplary miRNA-96 backbone with KCNQ4 targeting
sequence #1 sequence
(SEQ ID NO: 127)
GTGTCCCCAGAGAGCCCGCACCAGTGCCATCTGCTTGGCCGATTTGAGAATCCTGATGGAGCGG
CTTGTGTCTCTCCGCTCTGAGCCGGGCCATCAGATTCTCATATGGGAAAAGCAGGACCCGCAGC
TGCGTCCGCCTCCCCTGCAT
Exemplary miRNA-122 backbone with KCNQ4 targeting
sequence #1 sequence
(SEQ ID NO: 128)
TGAAGTTAACACCTTCGTGGCTACAGAGTTTCCTTAGCAGAGCTGTTGAGAATCCTGATGGAGC
ggGTGTCTAAACTATCccGCTCCATCcGGATTCTACATAGCTACTGCTAGGCAATCCTTCCCTC
GATAAATGTCTTGGCATCG
Exemplary miRNA-135 backbone with KCNQ4 targeting
sequence #1 sequence
(SEQ ID NO: 129)
GCCGCTGGACCCCTCCACTCTGCTGTGGCCTTGAGAATCCTGATGGAGCGGGATTGCTGTCCCA
AACTCCCGCTCCATCGGATTCTCAAGGCTACAGTGAGGGGCGAGCTCCTTCTCCTGC
Exemplary miRNA-182 backbone with KCNQ4 targeting
sequence #1 sequence
(SEQ ID NO: 130)
CTCCCCAGCTCCTGGGGGGAGCTGCTTGCCTCCCCCCGTTTTGAGAATCCTGATGGAGCGGACT
GGTGAGGTAACAGGATCCGCCGTCCATCTTTATTCTCACTATGGGGCGAGGACTCAGCCGGCAC
CCTGTGCACAGCCAGCGAGGG
Exemplary miRNA-183 backbone with KCNQ4 targeting
sequence #1 sequence
(SEQ ID NO: 131)
AGGGTCGGCAGGCCGCAGAGTGTGACTCCTGTTCTGTGTTTGAGAATCCTGATGGAGCGGGTGA
ACAGTCTCAGTCCCGCTCCCAGGAAATGGTCAAAAACAGAGCAGAGACAGATCCACGAGGGCCT
CCGGAGCACCTT
Exemplary miRNA-335 backbone with KCNQ4 targeting
sequence #1 sequence
(SEQ ID NO: 132)
GAAACAGATTGGAAATGATTTGTTTTGAGCGGGGGTTGAGAATCCTGATGGAGCGGGTTTGTCA
TAAACCCCGCTCCCTCAGGATTCCCAACCTCCTCTCATTTGCTATATTCAATTAAGTAA
Exemplary miRNA-451 backbone with KCNQ4 targeting
sequence #1 sequence
(SEQ ID NO: 133)
TGACTGCCAGGGCACTTGGGAATGGCAAGGTTGAGAATCCTGATGGAGCGGATTCCATCAGGAT
TCTCAGTCTTGCTATACCCAGAAAACGTGCCAGGAAGA
Exemplary miRNA-155 backbone with KCNQ4 targeting
sequence #lv2 sequence
(SEQ ID NO: 134)
CCTGCAGGCGCCGGCGTCCTCTGAGTGCTGAAGGCTTGCTGTAGGCTGTATGCTGTTGAGAATC
CTGATGGAGCGGGTTTTTGCCTCCAACTGACCCGCTCATAGGATTCTCAACAGTGTATGATGCC
TGTTAGTAGCATTCACATGGA
Exemplary miRNA-26 backbone with mouse KCNQ4 targeting
sequence #6 sequence
(SEQ ID NO: 135)
GAGCAGGAGGACCAAGGCCCTGGCGAAGGCCGTGGCCTCGATGCTGTCATAGTAATACCAGTGT
GCAGGTCCCAATGGCTGGTATTAATGTGACAGTCTCGGGGACGCGGGCCTGGACGCCGGCATCC
GGGCTCAGGACCCCCCTC
Exemplary microRNA-26 backbone with mouse KCNQ4 targeting
sequence #2 sequence
(SEQ ID NO: 136)
GAGCAGGAGGACCAAGGCCCTGGCGAAGGCCGTGGCCTCGTTGAGTCTTAGAGAGGCCCGGTGT
GCAGGTCCCAATGGCCGGGTCTTACTGAGATTCCACGGGGACGCGGGCCTGGACGCCGGCATCC
GGGCTCAGGACCCCCCTC
Exemplary miRNA-26 backbone with mouse KCNQ4 targeting
sequence #5 sequence
(SEQ ID NO: 137)
GAGCAGGAGGACCAAGGCCCTGGCGAAGGCCGTGGCCTCGTTTTCCACCTTGACTACGCGCTGT
GCAGGTCCCAATGGGCGTGTAGTAGAGGTGGAGCACGGGGACGCGGGCCTGGACGCCGGCATCC
GGGCTCAGGACCCCCCTC
Exemplary three copies of miRNA-26 backbone with mouse
KCNQ4 targeting sequence #6
sequence
(SEQ ID NO: 138)
GTGGCCTCGATGCTGTCATAGTAATACCAGTGTGCAGGTCCCAATGGCTGGTATTAATGTGACA
GTCTCGGGGACGCGCAATTGGGTGGCCTCGATGCTGTCATAGTAATACCAGTGTGCAGGTCCCA
ATGGCTGGTATTAATGTGACAGTCTCGGGGACGCGGGCGCGCCCGTGGCCTCGATGCTGTCATA
GTAATACCAGTGTGCAGGTCCCAATGGCTGGTATTAATGTGACAGTCTCGGGGACGC
Exemplary three copies of miRNA-26 backbone with mouse
KCNQ4 targeting sequence #2
sequence
(SEQ ID NO: 139)
GTGGCCTCGTTGAGTCTTAGAGAGGCCCGGTGTGCAGGTCCCAATGGCCGGGTCTTACTGAGAT
TCCACGGGGACGCGGGATCCGGTGGCCTCGTTGAGTCTTAGAGAGGCCCGGTGTGCAGGTCCCA
ATGGCCGGGTCTTACTGAGATTCCACGGGGACGCGGGTACCCGTGGCCTCGTTGAGTCTTAGAG
AGGCCCGGTGTGCAGGTCCCAATGGCCGGGTCTTACTGAGATTCCACGGGGACGC
Exemplary U6shRNA-hKCNQ4-395 sequence
(SEQ ID NO: 48)
TCCTCATCTTGGAATTCGTGATGcgaaCATCACGAATTCCAAGATGAGGA
Exemplary U6shRNA-hKCNQ4-909 sequence
(SEQ ID NO: 49)
CGCCTTACTGGGCATCTCTTTCTcgaaAGAAAGAGATGCCCAGTAAGGCG
Exemplary U6shRNA-hKCNQ4-1095 sequence
(SEQ ID NO: 50)
CTGGTACTACTATGACAGTATcgaaATACTGTCATAGTAGTAGCAG
Exemplary U6shRNA-hKCNQ4-1531 sequence
(SEQ ID NO: 51)
AAGTAGCAGAGGAGAAGAGCTcgaaAGCTCTTCTCCTCTGCTACTT
Exemplary U6shRNA-hKCNQ4-1593 sequence
(SEQ ID NO: 52)
AAGACAGTCATCCGCTCCATCcgaaGATGGAGCGGATGACTGTCTT
Exemplary U6shRNA-hKCNQ4-1677 sequence
(SEQ ID NO: 53)
AAGGACGTCATTGAGCAGTACcgaaGTACTGCTCAATGACGTCCTT
Exemplary U6shRNA-hKCNQ4-1721 sequence
(SEQ ID NO: 54)
GCCGGATCAAGAGCCTGCAAAcgaaTTTGCAGGCTCTTGATCCGGC
Exemplary U6shRNA-hKCNQ4-395 sequence
(SEQ ID NO: 55)
GGTGGATGAAATCAGCATGATcgaaATCATGCTGATTTCATCCACC
Exemplary Luciferase sequence
(SEQ ID NO: 140)
ATGGAAGATGCCAAAAACATTAAGAAGGGCCCAGCGCCATTCTACCCACTCGAAGACGGGACCG
CCGGCGAGCAGCTGCACAAAGCCATGAAGCGCTACGCCCTGGTGCCCGGCACCATCGCCTTTAC
CGACGCACATATCGAGGTGGACATTACCTACGCCGAGTACTTCGAGATGAGCGTTCGGCTGGCA
GAAGCTATGAAGCGCTATGGGCTGAATACAAACCATCGGATCGTGGTGTGCAGCGAGAATAGCT
TGCAGTTCTTCATGCCCGTGTTGGGTGCCCTGTTCATCGGTGTGGCTGTGGCCCCAGCTAACGA
CATCTACAACGAGCGCGAGCTGCTGAACAGCATGGGCATCAGCCAGCCCACCGTCGTATTCGTG
AGCAAGAAAGGGCTGCAAAAGATCCTCAACGTGCAAAAGAAGCTACCGATCATACAAAAGATCA
TCATCATGGATAGCAAGACCGACTACCAGGGCTTCCAAAGCATGTACACCTTCGTGACTTCCCA
TTTGCCACCCGGCTTCAACGAGTACGACTTCGTGCCCGAGAGCTTCGACCGGGACAAAACCATC
GCCCTGATCATGAACAGTAGTGGCAGTACCGGATTGCCCAAGGGCGTAGCCCTACCGCACCGCA
CCGCTTGTGTCCGATTCAGTCATGCCCGCGACCCCATCTTCGGCAACCAGATCATCCCCGACAC
CGCTATCCTCAGCGTGGTGCCATTTCACCACGGCTTCGGCATGTTCACCACGCTGGGCTACTTG
ATCTGCGGCTTTCGGGTCGTGCTCATGTACCGCTTCGAGGAGGAGCTATTCTTGCGCAGCTTGC
AAGACTATAAGATTCAATCTGCCCTGCTGGTGCCCACACTATTTAGCTTCTTCGCTAAGAGCAC
TCTCATCGACAAGTACGACCTAAGCAACTTGCACGAGATCGCCAGCGGCGGGGCGCCGCTCAGC
AAGGAGGTAGGTGAGGCCGTGGCCAAACGCTTCCACCTACCAGGCATCCGCCAGGGCTACGGCC
TGACAGAAACAACCAGCGCCATTCTGATCACCCCCGAAGGGGACGACAAGCCTGGCGCAGTAGG
CAAGGTGGTGCCCTTCTTCGAGGCTAAGGTGGTGGACTTGGACACAGGTAAGACACTGGGTGTG
AACCAGCGCGGCGAGCTGTGCGTCCGTGGCCCCATGATCATGAGCGGCTACGTTAACAACCCCG
AGGCTACAAACGCTCTCATCGACAAGGACGGCTGGCTGCACAGCGGCGACATCGCCTACTGGGA
CGAGGACGAGCACTTCTTCATCGTGGACCGGCTGAAGAGCCTGATCAAATACAAGGGCTACCAG
GTAGCCCCAGCCGAACTGGAGAGCATCCTGCTGCAACACCCCAACATCTTCGACGCCGGGGTCG
CCGGCCTGCCCGACGACGATGCCGGCGAGCTGCCCGCCGCAGTCGTCGTGCTGGAACACGGTAA
AACCATGACCGAGAAGGAGATCGTGGACTATGTGGCCAGCCAGGTTACAACCGCCAAGAAGCTG
CGCGGTGGTGTTGTGTTCGTGGACGAGGTGCCTAAAGGACTGACCGGCAAGTTGGACGCCCGCA
AGATCCGCGAGATTCTCATTAAGGCCAAGAAGGGCGGCAAGATCGCCGTG
Exemplary T2A sequence
(SEQ ID NO: 141)
GAGGGCAGAGGAAGTCTGCTAACATGCGGTGACGTCGAGGAGAATCCTGGCCCA
Exemplary TurboGFP sequence
(SEQ ID NO: 142)
ATGGAGAGCGACGAGAGCGGCCTGCCCGCCATGGAGATCGAGTGCCGCATCACCGGCACCCTGA
ACGGCGTGGAGTTCGAGCTGGTGGGCGGCGGAGAGGGCACCCCCGAGCAGGGCCGCATGACCAA
CAAGATGAAGAGCACCAAAGGCGCCCTGACCTTCAGCCCCTACCTGCTGAGCCACGTGATGGGC
TACGGCTTCTACCACTTCGGCACCTACCCCAGCGGCTACGAGAACCCCTTCCTGCACGCCATCA
ACAACGGCGGCTACACCAACACCCGCATCGAGAAGTACGAGGACGGCGGCGTGCTGCACGTGAG
CTTCAGCTACCGCTACGAGGCCGGCCGCGTGATCGGCGACTTCAAGGTGATGGGCACCGGCTTC
CCCGAGGACAGCGTGATCTTCACCGACAAGATCATCCGCAGCAACGCCACCGTGGAGCACCTGC
ACCCCATGGGCGATAACGATCTGGATGGCAGCTTCACCCGCACCTTCAGCCTGCGCGACGGCGG
CTACTACAGCTCCGTGGTGGACAGCCACATGCACTTCAAGAGCGCCATCCACCCCAGCATCCTG
CAGAACGGGGGCCCCATGTTCGCCTTCCGCCGCGTGGAGGAGGATCACAGCAACACCGAGCTGG
GCATCGTGGAGTACCAGCACGCCTTCAAGACCCCGGATGCAGATGCCGGTGAAGAATAA
Exemplary SV40 poly(A) signal sequence
(SEQ ID NO: 143)
TAAGATACATTGATGAGTTTGGACAAACCACAACTAGAATGCAGTGAAAAAAATGCTTTATTTG
TGAAATTTGTGATGCTATTGCTTTATTTGTAACCATTATAAGCTGCAATAAACAAGTT
Exemplary U6 promoter sequence
(SEQ ID NO: 144)
AAGGTCGGGCAGGAAGAGGGCCTATTTCCCATGATTCCTTCATATTTGCATATACGATACAAGG
CTGTTAGAGAGATAATTAGAATTAATTTGACTGTAAACACAAAGATATTAGTACAAAATACGTG
ACGTAGAAAGTAATAATTTCTTGGGTAGTTTGCAGTTTTAAAATTATGTTTTAAAATGGACTAT
CATATGCTTACCGTAACTTGAAAGTATTTCGATTTCTTGGCTTTATATATCTTGTGGAAAGGAC
GAAACACCG
Exemplary hKCNQ4 codon optimized sequence
(SEQ ID NO: 9)
ATGGCTGAAGCCCCTCCTAGAAGGCTTGGACTGGGACCTCCTCCTGGGGATGCTCCTAGAGCTG
AACTGGTGGCTCTGACAGCCGTGCAGTCTGAACAAGGCGAAGCTGGTGGCGGCGGATCTCCACG
TAGACTTGGACTGCTGGGAAGCCCTCTTCCTCCTGGTGCTCCACTTCCTGGACCTGGCAGTGGA
TCTGGATCTGCCTGTGGCCAGAGAAGCTCTGCCGCTCACAAGAGATACCGGCGGCTGCAGAACT
GGGTGTACAACGTGCTGGAAAGACCCAGAGGCTGGGCCTTCGTGTACCACGTGTTCATCTTTCT
GCTGGTGTTCAGCTGCCTGGTGCTGTCCGTGCTGAGCACCATCCAAGAACATCAAGAGCTGGCT
AACGAGTGCCTGTTAATACTGGAGTTTGTGATGATTGTGGTGTTCGGCCTCGAGTACATCGTCC
GCGTTTGGAGCGCCGGCTGCTGCTGCAGATATAGAGGTTGGCAAGGCAGATTCCGCTTCGCCAG
AAAGCCCTTCTGCGTGATCGACTTCATCGTGTTCGTGGCCAGCGTGGCCGTGATTGCTGCTGGC
ACACAGGGCAACATCTTCGCCACAAGCGCCCTGCGGAGCATGCGGTTTCTGCAGATCCTGAGAA
TGGTCCGAATGGACAGAAGAGGCGGCACCTGGAAGCTGCTGGGCTCTGTGGTGTACGCCCACAG
CAAAGAGCTGATCACCGCCTGGTACATCGGATTTCTGGTGCTGATCTTCGCCTCCTTCCTGGTG
TACCTGGCCGAGAAGGACGCCAACAGCGACTTTAGCAGCTACGCCGACTCTCTTTGGTGGGGCA
CCATCACACTGACCACCATCGGCTACGGCGACAAGACCCCTCACACATGGCTGGGAAGAGTGCT
GGCCGCTGGATTTGCTCTGCTGGGCATCAGCTTTTTCGCCCTGCCTGCCGGAATCCTCGGATCT
GGCTTTGCCCTGAAGGTGCAAGAGCAGCACCGGCAGAAGCACTTCGAGAAGAGAAGAATGCCTG
CCGCCAACCTGATTCAGGCCGCTTGGAGACTGTACAGCACCGACATGAGCAGAGCCTACCTGAC
CGCCACGTGGTATTATTACGACTCGATCCTGCCTAGCTTCCGCGAACTGGCCCTGCTGTTTGAG
CATGTGCAGAGAGCCAGAAACGGCGGCCTCAGACCTCTGGAAGTTCGGAGAGCACCTGTGCCTG
ATGGCGCCCCTTCTAGATATCCTCCAGTGGCCACCTGTCACAGACCCGGCAGCACATCTTTTTG
CCCTGGCGAGTCTAGCCGGATGGGCATCAAGGACAGAATCAGAATGGGCAGCAGCCAGCGGAGA
ACAGGCCCTTCTAAACAGCATCTGGCCCCTCCAACCATGCCTACAAGCCCTAGCTCTGAGCAAG
TGGGCGAAGCCACCTCTCCTACCAAGGTGCAGAAGTCCTGGTCCTTCAACGACCGGACCAGATT
CAGAGCCAGCCTGAGACTGAAGCCCAGAACCTCTGCCGAGGATGCCCCTTCTGAAGAGGTGGCC
GAAGAGAAGTCCTACCAGTGCGAGCTGACCGTGGACGACATCATGCCAGCCGTGAAAACCGTGA
TACGGTCTATCCGGATCCTGAAGTTCCTGGTGGCCAAGCGGAAGTTCAAAGAGACACTGCGGCC
CTACGACGTGAAGGACGTGATCGAGCAGTATTCTGCCGGCCACCTGGACATGCTGGGCAGAATC
AAGAGCCTGCAGACCAGAGTGGACCAGATCGTTGGAAGAGGCCCAGGCGACAGAAAGGCCAGAG
AGAAGGGCGATAAGGGCCCATCTGATGCCGAGGTTGTCGACGAGATATCAATGATGGGCAGAGT
GGTCAAGGTGGAAAAACAGGTGCAGAGCATCGAGCACAAGCTGGACCTGCTGCTGGGATTCTAC
AGCCGGTGTCTGAGAAGCGGCACATCTGCATCTCTGGGCGCTGTGCAGGTCCCACTGTTCGACC
CTGATATCACCAGCGACTATCACAGCCCCGTGGACCACGAGGACATCTCCGTTTCTGCTCAGAC
CCTGAGCATGAGCAGATCCGTGTCCACCAACATGGAC
Exemplary 3xFlag sequence
(SEQ ID NO: 145)
GACTACAAAGACCATGACGGTGATTATAAAGATCATGACATCGACTACAAGGATGACGATGACA
AG
Exemplary mScarlet sequence
(SEQ ID NO: 146)
ATGGTGAGCAAGGGCGAGGCAGTGATCAAGGAGTTCATGCGGTTCAAGGTGCACATGGAGGGCT
CCATGAACGGCCACGAGTTCGAGATCGAGGGCGAGGGCGAGGGCCGCCCCTACGAGGGCACCCA
GACCGCCAAGCTGAAGGTGACCAAGGGTGGCCCCCTGCCCTTCTCCTGGGACATCCTGTCCCCT
CAGTTCATGTACGGCTCCAGGGCCTTCATCAAGCACCCCGCCGACATCCCCGACTACTATAAGC
AGTCCTTCCCCGAGGGCTTCAAGTGGGAGCGCGTGATGAACTTCGAGGACGGCGGCGCCGTGAC
CGTGACCCAGGACACCTCCCTGGAGGACGGCACCCTGATCTACAAGGTGAAGCTCCGCGGCACC
AACTTCCCTCCTGACGGCCCCGTAATGCAGAAGAAGACAATGGGCTGGGAAGCGTCCACCGAGC
GGTTGTACCCCGAGGACGGCGTGCTGAAGGGCGACATTAAGATGGCCCTGCGCCTGAAGGACGG
CGGCCGCTACCTGGCGGACTTCAAGACCACCTACAAGGCCAAGAAGCCCGTGCAGATGCCCGGC
GCCTACAACGTCGACCGCAAGTTGGACATCACCTCCCACAACGAGGACTACACCGTGGTGGAAC
AGTACGAACGCTCCGAGGGCCGCCACTCCACCGGCGGCATGGACGAGCTGTACAAGTAA
Exemplary hKCNQ4 codon optimized sequence
(SEQ ID NO: 10)
ATGGCTGAAGCCCCTCCTAGAAGGCTTGGACTGGGACCTCCTCCTGGGGATGCTCCTAGAGCTG
AACTGGTGGCTCTGACAGCCGTGCAGTCTGAACAAGGCGAAGCTGGTGGCGGCGGATCTCCACG
TAGACTTGGACTGCTGGGAAGCCCTCTTCCTCCTGGTGCTCCACTTCCTGGACCTGGCAGTGGA
TCTGGATCTGCCTGTGGCCAGAGAAGCTCTGCCGCTCACAAGAGATACCGGCGGCTGCAGAACT
GGGTGTACAACGTGCTGGAAAGACCCAGAGGCTGGGCCTTCGTGTACCACGTGTTCATCTTTCT
GCTGGTGTTCAGCTGCCTGGTGCTGTCCGTGCTGAGCACCATCCAAGAACATCAAGAGCTGGCT
AACGAGTGCCTGTTAATACTGGAGTTTGTGATGATTGTGGTGTTCGGCCTCGAGTACATCGTCC
GCGTTTGGAGCGCCGGCTGCTGCTGCAGATATAGAGGTTGGCAAGGCAGATTCCGCTTCGCCAG
AAAGCCCTTCTGCGTGATCGACTTCATCGTGTTCGTGGCCAGCGTGGCCGTGATTGCTGCTGGC
ACACAGGGCAACATCTTCGCCACAAGCGCCCTGCGGAGCATGCGGTTTCTGCAGATCCTGAGAA
TGGTCCGAATGGACAGAAGAGGCGGCACCTGGAAGCTGCTGGGCTCTGTGGTGTACGCCCACAG
CAAAGAGCTGATCACCGCCTGGTACATCGGATTTCTGGTGCTGATCTTCGCCTCCTTCCTGGTG
TACCTGGCCGAGAAGGACGCCAACAGCGACTTTAGCAGCTACGCCGACTCTCTTTGGTGGGGCA
CCATCACACTGACCACCATCGGCTACGGCGACAAGACCCCTCACACATGGCTGGGAAGAGTGCT
GGCCGCTGGATTTGCTCTGCTGGGCATCAGCTTTTTCGCCCTGCCTGCCGGAATCCTCGGATCT
GGCTTTGCCCTGAAGGTGCAAGAGCAGCATAGACAAAAGCATTTTGAAAAGAGAAGAATGCCTG
CCGCCAACCTGATTCAGGCCGCTTGGAGACTGTACAGCACCGACATGAGCAGAGCCTACCTGAC
CGCCACGTGGTATTATTACGATTCGATCCTGCCTAGCTTCCGCGAACTGGCCCTGCTGTTTGAG
CATGTGCAGAGAGCCAGAAACGGCGGCCTCAGACCTCTGGAAGTTCGGAGAGCACCTGTGCCTG
ATGGCGCCCCTTCTAGATATCCTCCAGTGGCCACCTGTCACAGACCCGGCAGCACATCTTTTTG
CCCTGGCGAGTCTAGCCGGATGGGCATCAAGGACAGAATCAGAATGGGCAGCAGCCAGCGGAGA
ACAGGCCCTTCTAAACAGCATCTGGCCCCTCCAACCATGCCTACAAGCCCTAGCTCTGAGCAAG
TGGGCGAAGCCACCTCTCCTACCAAGGTGCAGAAGTCCTGGTCCTTCAACGACCGGACCAGATT
TAGAGCCAGCCTCCGGCTGAAGCCCAGAACCTCTGCCGAGGATGCCCCTTCTGAAGAGGTGGCC
GAAGAGAAGTCCTACCAGTGCGAGCTGACCGTGGACGACATCATGCCAGCCGTGAAAACCGTGA
TAAGGTCTATACGCATCCTGAAGTTCCTGGTGGCCAAGCGGAAGTTCAAAGAGACACTGCGGCC
CTACGACGTGAAGGACGTGATCGAGCAGTATTCTGCCGGCCACCTGGACATGCTGGGCAGAATC
AAGAGCCTGCAGACCAGAGTGGACCAGATCGTTGGAAGAGGCCCAGGCGACAGAAAGGCCAGAG
AGAAGGGCGATAAGGGCCCATCTGATGCCGAGGTTGTCGACGAGATATCAATGATGGGCAGAGT
CGTGAAAGTCGAAAAACAGGTGCAGAGCATCGAGCACAAGCTGGACCTGCTGCTGGGATTCTAC
AGCCGGTGTCTGAGAAGCGGCACATCTGCATCTCTGGGCGCTGTGCAGGTCCCACTGTTCGATC
CTGATATTACGAGCGATTATCACAGCCCCGTGGACCACGAGGACATCTCCGTTTCTGCTCAGAC
CCTGAGCATCAGCAGATCCGTGTCCACCAACATGGAC
Exemplary guide RNA hsammu386Fw sequence
(SEQ ID NO: 42)
AGGAGCACCAGGAACTTGCCA
Exemplary tracrRNA sequence
(SEQ ID NO: 147)
GTTTAAGTACTCTGTGCTGGAAACAGCACAGAATCTACTTAAACAAGGCAAAATGCCGTGTTTA
TCTCGTCAACTTGTTGGCGAGA
Exemplary U6shRNA-hKCNQ4-395 sequence
(SEQ ID NO: 148)
CTCCCCAGCTCCTGGGGGGAGCTGCTTGCCTCCCCCCGTTTTGAGAATCCTGATGGAGCggACT
GGTGAGGTAACAGGATCCGCCGTCCATCTTTATTCTCACTATGGGGCGAGGACTCAGCCGGCAC
CCTGTGCACAGCCAGCGAGGG
Exemplary Pol III transcriptional termination sequence
(SEQ ID NO: 149)
TTTTTT
Exemplary guide RNA U6-hsa408Rev sequence
(SEQ ID NO: 43)
AAGCCGAAAACCACGATCATC
Exemplary guide RNA U6-mmu408Rev sequence
(SEQ ID NO: 150)
AAGCCAAAGACCACAATCATC
Exemplary SV-40 Nuclear localization signal sequence
(SEQ ID NO: 151)
ATGGCCCCTAAGAAGAAGCGGAAAGTC
Exemplary catalytically inactive saCas9 coding sequence
(SEQ ID NO: 152)
AAGCGGAACTATATCCTGGGCCTCGCCATCGGCATCACCAGCGTTGGCTACGGCATCATCGACT
ACGAGACACGGGACGTGATCGATGCCGGCGTGCGGCTGTTTAAAGAGGCCAACGTCGAGAACAA
CGAGGGCCGCAGATCTAAGAGAGGCGCCAGACGGCTGAAGCGGAGAAGAAGGCACAGAATCCAG
AGAGTGAAGAAGCTGCTGTTCGACTACAACCTGCTGACCGACCACAGCGAGCTGAGCGGCATCA
ATCCTTACGAGGCCAGAGTGAAGGGCCTGAGCCAGAAGCTGAGCGAGGAAGAGTTTAGCGCCGC
TCTGCTGCACCTGGCCAAGAGAAGAGGCGTGCACAACGTGAACGAGGTGGAAGAGGACACCGGC
AACGAGCTGTCCACCAAAGAGCAGATCAGCCGGAACAGCAAGGCCCTGGAAGAGAAATACGTGG
CCGAACTGCAGCTGGAACGGCTGAAAAAGGATGGCGAAGTGCGGGGCAGCATCAATCGGTTCAA
GACCAGCGACTACGTGAAAGAAGCCAAACAGCTGCTGAAGGTGCAGAAGGCCTACCACCAGCTG
GACCAGAGCTTCATCGACACCTACATCGACCTGCTGGAAACCCGGCGGACCTACTATGAAGGAC
CTGGCGAGGGAAGCCCCTTCGGCTGGAAGGACATCAAAGAATGGTACGAGATGCTGATGGGCCA
CTGCACCTACTTTCCCGAGGAACTGCGGAGCGTGAAGTACGCCTACAACGCCGACCTGTACAAC
GCCCTGAACGACCTGAACAACCTCGTGATCACCCGGGACGAGAACGAGAAGCTGGAATATTACG
AGAAGTTCCAGATCATCGAGAACGTGTTCAAGCAGAAGAAGAAACCCACGCTGAAGCAGATCGC
CAAAGAGATCCTGGTCAACGAGGAAGATATCAAGGGCTACAGAGTGACCAGCACCGGCAAGCCC
GAGTTCACCAACCTGAAGGTGTACCACGACATCAAGGATATCACAGCCCGGAAAGAGATTATTG
AGAACGCCGAGCTGCTGGACCAAATCGCCAAGATCCTGACCATCTACCAGAGCAGCGAGGACAT
CCAAGAGGAACTGACCAATCTGAACTCCGAGCTGACCCAAGAAGAGATCGAGCAGATCTCTAAT
CTGAAGGGGTACACCGGCACACACAACCTGAGCCTGAAGGCCATCAACCTGATCCTGGACGAGC
TGTGGCACACCAACGACAACCAGATTGCCATCTTCAACAGGCTGAAGCTGGTGCCCAAGAAGGT
GGACCTGTCTCAGCAGAAAGAAATCCCCACCACACTGGTGGACGACTTCATTCTGAGCCCCGTG
GTCAAGAGGAGCTTCATCCAGAGCATCAAAGTGATCAACGCCATCATCAAGAAGTACGGGCTGC
CCAACGATATCATCATCGAGCTGGCCCGCGAGAAGAACTCCAAGGACGCCCAGAAAATGATCAA
CGAGATGCAGAAGAGGAACCGCCAGACCAACGAGCGGATCGAGGAAATCATCCGGACCACCGGC
AAAGAGAACGCCAAGTACCTGATCGAGAAGATCAAGCTGCACGACATGCAAGAGGGCAAGTGCC
TGTACAGCCTGGAAGCCATTCCTCTGGAAGATCTGCTGAACAATCCCTTCAACTATGAGGTGGA
CCACATCATCCCCAGAAGCGTGTCCTTCGACAACAGCTTCAACAACAAGGTGCTCGTGAAGCAA
GAGGAAGCCAGCAAGAAGGGCAACAGAACCCCATTCCAGTACCTGAGCAGCAGCGACAGCAAGA
TCAGCTACGAAACCTTCAAGAAGGACATCCTGAATCTGGCCAAAGGCAAGGGCAGAATCAGCAA
GACCAAGAAAGAATACCTGCTCGAGGAACGGGACATCAACAGATTCAGCGTGCAGAAAGACTTC
ATCAATCGGAACCTGGTGGACACCAGATACGCCACCAGAGGCCTGATGAATCTGCTGCGGAGCT
ACTTCAGAGTGAACAATCTGGACGTGAAAGTCAAGTCCATCAACGGCGGCTTCACCAGCTTTCT
GCGGCGGAAGTGGAAGTTCAAGAAAGAGCGGAACAAGGGCTATAAGCACCACGCCGAGGACGCC
CTGATCATTGCCAACGCCGATTTCATCTTCAAAGAGTGGAAGAAACTGGACAAGGCCAAAAAAG
TGATGGAAAACCAGATGTTCGAGGAAAAGCAGGCCGAGAGCATGCCCGAGATCGAAACCGAGCA
AGAGTACAAAGAGATTTTCATCACGCCCCACCAGATCAAGCACATTAAGGACTTCAAGGACTAG
AAGTACAGCCACCGCGTGGACAAGAAGCCCAATAGAGAGCTGATTAACGACACCCTGTACTCTA
CCCGGAAGGACGACAAGGGCAATACCCTGATCGTCAACAACCTGAACGGCCTGTACGACAAGGA
CAAGGACAAGCTCAAGAAGCTGATCAAGAAGAGCCCCGAGAAACTGCTGATGTACCACCACGAT
CCTCAGACCTACCAGAAACTGAAGCTCATCATGGAACAGTACGGCGACGAGAAGAATCCCCTGT
ACAAGTACTACGAGGAAACCGGGAACTACCTGACCAAGTACTCCAAAAAGGACAATGGGCCCGT
GATCAAGAAGATTAAGTATTACGGCAACAAGCTGAATGCCCACCTGGACATCACCGACGACTAC
CCCAACAGCAGAAACAAGGTGGTCAAGCTGTCCCTGAAGCCTTACAGATTCGACGTGTACCTGG
ACAACGGCGTGTAGAAGTTCGTGACCGTGAAGAACCTGGACGTCATCAAAAAAGAAAACTAGTA
CGAAGTCAACAGCAAGTGCTATGAGGAAGCCAAGAAACTCAAGAAAATCAGCAACCAGGCCGAG
TTTATCGCCTCCTTCTACAACAACGATCTGATCAAGATCAACGGGGAGCTGTATAGAGTGATCG
GCGTGAACAATGACCTGCTGAACCGGATCGAAGTGAACATGATCGACATCACCTACCGCGAGTA
CCTCGAGAACATGAACGATAAGCGGCCTCCACGGATCATTAAGACAATCGCCAGCAAGACGCAG
AGCATTAAGAAGTACAGCACAGACATCCTGGGCAACCTGTACGAAGTGAAGTCTAAGAAGCACC
CGCAGATTATCAAGAAAGGC
Exemplary SV-40 Nuclear localization sequence
(SEQ ID NO: 153)
CCCAAGAAAAAACGGAAGGTT
Exemplary catalytically active saCas9 coding sequence
(SEQ ID NO: 154)
AAGCGGAACTATATCCTGGGCCTCGACATCGGCATCACCAGCGTTGGCTACGGCATCATCGACT
ACGAGACACGGGACGTGATCGATGCCGGCGTGCGGCTGTTTAAAGAGGCCAACGTCGAGAACAA
CGAGGGCCGCAGATCTAAGAGAGGCGCCAGACGGCTGAAGCGGAGAAGAAGGCACAGAATCCAG
AGAGTGAAGAAGCTGCTGTTCGACTACAACCTGCTGACCGACCACAGCGAGCTGAGCGGCATCA
ATCCTTACGAGGCCAGAGTGAAGGGCCTGAGCCAGAAGCTGAGCGAGGAAGAGTTTAGCGCCGC
TCTGCTGCACCTGGCCAAGAGAAGAGGCGTGCACAACGTGAACGAGGTGGAAGAGGACACCGGC
AACGAGCTGTCCACCAAAGAGCAGATCAGCCGGAACAGCAAGGCCCTGGAAGAGAAATACGTGG
CCGAACTGCAGCTGGAACGGCTGAAAAAGGATGGCGAAGTGCGGGGCAGCATCAATCGGTTCAA
GACCAGCGACTACGTGAAAGAAGCCAAACAGCTGCTGAAGGTGCAGAAGGCCTACCACCAGCTG
GACCAGAGCTTCATCGACACCTACATCGACCTGCTGGAAACCCGGCGGACCTACTATGAAGGAC
CTGGCGAGGGAAGCCCCTTCGGCTGGAAGGACATCAAAGAATGGTACGAGATGCTGATGGGCCA
CTGCACCTACTTTCCCGAGGAACTGCGGAGCGTGAAGTACGCCTACAACGCCGACCTGTACAAC
GCCCTGAACGACCTGAACAACCTCGTGATCACCCGGGACGAGAACGAGAAGCTGGAATATTACG
AGAAGTTCCAGATCATCGAGAACGTGTTCAAGCAGAAGAAGAAACCCACGCTGAAGCAGATCGC
CAAAGAGATCCTGGTCAACGAGGAAGATATCAAGGGCTACAGAGTGACCAGCACCGGCAAGCCC
GAGTTCACCAACCTGAAGGTGTACCACGACATCAAGGATATCACAGCCCGGAAAGAGATTATTG
AGAACGCCGAGCTGCTGGACCAAATCGCCAAGATCCTGACCATCTACCAGAGCAGCGAGGACAT
CCAAGAGGAACTGACCAATCTGAACTCCGAGCTGACCCAAGAAGAGATCGAGCAGATCTCTAAT
CTGAAGGGGTACACCGGCACACACAACCTGAGCCTGAAGGCCATCAACCTGATCCTGGACGAGC
TGTGGCACACCAACGACAACCAGATTGCCATCTTCAACAGGCTGAAGCTGGTGCCCAAGAAGGT
GGACCTGTCTCAGCAGAAAGAAATCCCCACCACACTGGTGGACGACTTCATTCTGAGCCCCGTG
GTCAAGAGGAGCTTCATCCAGAGCATCAAAGTGATCAACGCCATCATCAAGAAGTACGGGCTGC
CCAACGATATCATCATCGAGCTGGCCCGCGAGAAGAACTCCAAGGACGCCCAGAAAATGATCAA
CGAGATGCAGAAGAGGAACCGCCAGACCAACGAGCGGATCGAGGAAATCATCCGGACCACCGGC
AAAGAGAACGCCAAGTACCTGATCGAGAAGATCAAGCTGCACGACATGCAAGAGGGCAAGTGCC
TGTACAGCCTGGAAGCCATTCCTCTGGAAGATCTGCTGAACAATCCCTTCAACTATGAGGTGGA
CCACATCATCCCCAGAAGCGTGTCCTTCGACAACAGCTTCAACAACAAGGTGCTCGTGAAGCAA
GAGGAAAACAGCAAGAAGGGCAACAGAACCCCATTCCAGTACCTGAGCAGCAGCGACAGCAAGA
TCAGCTACGAAACCTTCAAGAAGCACATCCTGAATCTGGCCAAAGGCAAGGGCAGAATCAGCAA
GACCAAGAAAGAATACCTGCTCGAGGAACGGGACATCAACAGATTCAGCGTGCAGAAAGACTTC
ATCAATCGGAACCTGGTGGACACCAGATACGCCACCAGAGGCCTGATGAATCTGCTGCGGAGCT
ACTTCAGAGTGAACAATCTGGACGTGAAAGTCAAGTCCATCAACGGCGGCTTCACCAGCTTTCT
GCGGCGGAAGTGGAAGTTCAAGAAAGAGCGGAACAAGGGCTATAAGCACCACGCCGAGGACGCC
CTGATCATTGCCAACGCCGATTTCATCTTCAAAGAGTGGAAGAAACTGGACAAGGCCAAAAAAG
TGATGGAAAACCAGATGTTCGAGGAAAAGCAGGCCGAGAGCATGCCCGAGATCGAAACCGAGCA
AGAGTACAAAGAGATTTTCATCACGCCCCACCAGATCAAGCACATTAAGGACTTCAAGGACTAG
AAGTACAGCCACCGCGTGGACAAGAAGCCCAATAGAGAGCTGATTAACGACACCCTGTACTCTA
CCCGGAAGGACGACAAGGGCAATACCCTGATCGTCAACAACCTGAACGGCCTGTACGACAAGGA
CAACGACAAGCTCAAGAAGCTGATCAACAAGAGCCCCGAGAAACTGCTGATGTACCACCACGAT
CCTCAGACCTACCAGAAACTGAAGCTCATCATGGAACAGTACGGCGACGAGAAGAATCCCCTGT
ACAAGTACTACGAGGAAACCGGGAACTACCTGACCAAGTACTCCAAAAAGGACAATGGGCCCGT
GATCAAGAAGATTAAGTATTACGGCAACAAGCTGAATGCCCACCTGGACATCACCGACGACTAC
CCCAACAGCAGAAACAAGGTGGTCAAGCTGTCCCTGAAGCCTTACAGATTCGACGTGTACCTGG
ACAACGGCGTGTAGAAGTTCGTGACCGTGAAGAACCTGGACGTCATCAAAAAAGAAAACTAGTA
CGAAGTCAACAGCAAGTGCTATGAGGAAGCCAAGAAACTCAAGAAAATCAGCAACCAGGCCGAG
TTTATCGCCTCCTTCTACAACAACGATCTGATCAAGATCAACGGGGAGCTGTATAGAGTGATCG
GCGTGAACAATGACCTGCTGAACCGGATCGAAGTGAACATGATCGACATCACCTACCGCGAGTA
CCTCGAGAACATGAACGATAAGCGGCCTCCACGGATCATTAAGACAATCGCCAGCAAGACGCAG
AGCATTAAGAAGTACAGCACAGACATCCTGGGCAACCTGTACGAAGTGAAGTCTAAGAAGCACC
CGCAGATTATCAAGAAAGGC
Exemplary guide RNA hsa233Fw sequence
(SEQ ID NO: 44)
GCGCTACCGCCGCCTGCAGAA
Exemplary guide RNA hsa447Fw sequence
(SEQ ID NO: 45)
TTTCGGCTTGGAGTACATCGT
Exemplary guide RNA hsa482Fw sequence
(SEQ ID NO: 46)
CCGGATGCTGCTGCCGCTACC
Exemplary guide RNA hsa4902Fw sequence
(SEQ ID NO: 47)
TGCTGCCGCTACCGAGGATGG

[0364] Exemplary Construct Cloning Sites

Exemplary Cloning site A sequence
(SEQ ID NO: 155)
GCGGCCGCACGCGT
Exemplary Cloning site C sequence
(SEQ ID NO: 156)
CTCCTGGGCAACGTGCTGGTTATTGTGACCGGTCGCTAGCCACC
Exemplary Cloning site D sequence
(SEQ ID NO: 157)
CCTGCAGGCGCCGGCG
Exemplary Cloning site E sequence
(SEQ ID NO: 158)
GAGCTCGCTGATCAGCCTCGA
Exemplary Cloning site F sequence
(SEQ ID NO: 159)
AAGCTTGAATTCAGCTGACGTGCCTCGGACCGCT
Exemplary Cloning site G sequence
(SEQ ID NO: 160)
GCGGCCGCACGCGTCTAGATCCCATATATGGAGTTCCG
Exemplary Cloning site H sequence
(SEQ ID NO: 161)
CAGATCGCCTGGAGACGCACCGGTGCCACC
Exemplary Cloning site I sequence
(SEQ ID NO: 162)
GGCTCCGGA
Exemplary Cloning site J sequence
(SEQ ID NO: 163)
GAGCTCGCTGATCAGCCTCGA
Exemplary Cloning site K sequence
(SEQ ID NO: 164)
TTAATT
Exemplary Cloning site L sequence
(SEQ ID NO: 165)
GGATCCCGGGCT
Exemplary Cloning site M sequence
(SEQ ID NO: 166)
TAAGAGCTCGCTGATCAGCCTCGA
Exemplary Cloning site N sequence
(SEQ ID NO: 167)
CTAAAGCTTGAATTCAAGCTTGAATTCAGCTGA
CGTGCCTCGGACCGCT
Exemplary Cloning site O sequence
(SEQ ID NO: 168)
GGCAGCGGC
Exemplary Cloning site P sequence
(SEQ ID NO: 169)
AGCGGCGCT
Exemplary Cloning site Q sequence
(SEQ ID NO: 170)
CTAAAGCTTGAATTCAGCTGACGTGCCTCGGACCGCT
Exemplary Cloning site R sequence
(SEQ ID NO: 171)
TAATAAGAGCTCGCTGATCAGCCTCGA

[0365] Exemplary miRNA Construct Sequences (Part 1)

Exemplary pITR.CAG.miR2-16_EGFP Construct sequence
(SEQ ID NO: 172)
CTGCGCGCTCGCTCGCTCACTGAGGCCGCCCGGGCGTCGGGCGACCTTTGGTCGCCCGGCCTCA
GTGAGCGAGCGAGCGCGCAGAGAGGGAGTGGCCAACTCCATCACTAGGGGTTCCTGCGGCCGCA
CGCGTGACATTGATTATTGACTAGTTATTAATAGTAATCAATTACGGGGTCATTAGTTCATAGC
CCATATATGGAGTTCCGCGTTACATAACTTACGGTAAATGGCCCGCCTGGCTGACCGCCCAACG
ACCCCCGCCCATTGACGTCAATAATGACGTATGTTCCCATAGTAACGCCAATAGGGACTTTCCA
TTGACGTCAATGGGTGGACTATTTACGGTAAACTGCCCACTTGGCAGTACATCAAGTGTATCAT
ATGCCAAGTACGCCCCCTATTGACGTCAATGACGGTAAATGGCCCGCCTGGCATTATGCCCAGT
ACATGACCTTATGGGACTTTCCTACTTGGCAGTACATCTACGTATTAGTCATCGCTATTACCAT
GGGTCGAGGTGAGCCCCACGTTCTGCTTCACTCTCCCCATCTCCCCCCCCTCCCCACCCCCAAT
TTTGTATTTATTTATTTTTTAATTATTTTGTGCAGCGATGGGGGCGGGGGGGGGGGGGGCGCGC
GCCAGGCGGGGCGGGGCGGGGCGAGGGGCGGGGCGGGGCGAGGCGGAGAGGTGCGGCGGCAGCC
AATCAGAGCGGCGCGCTCCGAAAGTTTCCTTTTATGGCGAGGCGGCGGCGGCGGCGGCCCTATA
AAAAGCGAAGCGCGCGGCGGGCGGGAGTCGCTGCGTTGCCTTCGCCCCGTGCCCCGCTCCGCGC
CGCCTCGCGCCGCCCGCCCCGGCTCTGACTGACCGCGTTACTCCCACAGGTGAGCGGGCGGGAC
GGCCCTTCTCCTCCGGGCTGTAATTAGCGCTTGGTTTAATGACGGCTCGTTTCTTTTCTGTGGC
TGCGTGAAAGCCTTAAAGGGCTCCGGGAGGGCCCTTTGTGCGGGGGGGAGCGGCTCGGGGGGTG
CGTGCGTGTGTGTGTGCGTGGGGAGCGCCGCGTGCGGCCCGCGCTGCCCGGCGGCTGTGAGCGC
TGCGGGCGCGGCGCGGGGCTTTGTGCGCTCCGCGTGTGCGCGAGGGGAGCGCGGCCGGGGGCGG
TGCCCCGCGGTGCGGGGGGGCTGCGAGGGGAACAAAGGCTGCGTGCGGGGTGTGTGCGTGGGGG
GGTGAGCAGGGGGTGTGGGCGCGGCGGTCGGGCTGTAACCCCCCCCTGCACCCCCCTCCCCGAG
TTGCTGAGCACGGCCCGGCTTCGGGTGCGGGGCTCCGTGCGGGGCGTGGCGCGGGGCTCGCCGT
GCCGGGCGGGGGGTGGCGGCAGGTGGGGGTGCCGGGCGGGGCGGGGCCGCCTCGGGCCGGGGAG
GGCTCGGGGGAGGGGCGCGGCGGCCCCCGGAGCGCCGGCGCATAGCTCTTATGATAGCAATGTC
AGCAGTGCCTTTGAGTCTCAGAGATGCCCGGGTTAAGATTCTAAAATTATCACGGGTATTACTT
GAGGCTCAGAAGTAAGGTTGACCATACTCTACAGTTGTGTCTAGAGCCTCTGCTAACCATGTTC
ATGCCTTCTTCTTTTTCCTACAGCTCCTGGGCAACGTGCTGGTTATTGTGACCGGTCGCTAGCC
ACCATGGTGAGCAAGGGCGAGGAGCTGTTCACCGGGGTGGTGCCCATCCTGGTCGAGCTGGACG
GCGACGTAAACGGCCACAAGTTCAGCGTGTCCGGCGAGGGCGAGGGCGATGCCACCTACGGCAA
GCTGACCCTGAAGTTCATCTGCACCACCGGCAAGCTGCCCGTGCCCTGGCCCACCCTCGTGACC
ACCCTGACCTACGGCGTGCAGTGCTTCAGCCGCTACCCCGACCACATGAAGCAGCACGACTTCT
TCAAGTCCGCCATGCCCGAAGGCTACGTCCAGGAGCGCACCATCTTCTTCAAGGACGACGGCAA
CTACAAGACCCGCGCCGAGGTGAAGTTCGAGGGCGACACCCTGGTGAACCGCATCGAGCTGAAG
GGCATCGACTTCAAGGAGGACGGCAACATCCTGGGGCACAAGCTGGAGTACAACTACAACAGCC
ACAACGTCTATATCATGGCCGACAAGCAGAAGAACGGCATCAAGGTGAACTTCAAGATCCGCCA
CAACATCGAGGACGGCAGCGTGCAGCTCGCCGACCACTACCAGCAGAACACCCCCATCGGCGAC
GGCCCCGTGCTGCTGCCCGACAACCACTACCTGAGCACCCAGTCCGCCCTGAGCAAAGACCCCA
ACGAGAAGCGCGATCACATGGTCCTGCTGGAGTTCGTGACCGCCGCCGGGATCACTCTCGGCAT
GGACGAGCTGTACAAGTAAcctgcaggcgccggcgCATAGCTCTTATGATAGCAATGTCAGCAG
TGCCTTTGAGTCTCAGAGATGCCCGGGTTAAGATTCTAAAATTATCACGGGTATTACTTGAGGC
TCAGAAGTAAGGTTGACCATACTCTACAGTTGTGGAGCTCGCTGATCAGCCTCGACTGTGCCTT
CTAGTTGCCAGCCATCTGTTGTTTGCCCCTCCCCCGTGCCTTCCTTGACCCTGGAAGGTGCCAC
TCCCACTGTCCTTTCCTAATAAAATGAGGAAATTGCATCGCATTGTCTGAGTAGGTGTCATTCT
ATTCTGGGGGGTGGGGTGGGGCAGGACAGCAAGGGGGAGGATTGGGAAGACAATAGCAGGCATG
CTGGGGATGCGGTGGGCTCTATGGAAGCTTGAATTCAGCTGACGTGCCTCGGACCGCTAGGAAC
CCCTAGTGATGGAGTTGGCCACTCCCTCTCTGCGCGCTCGCTCGCTCACTGAGGCCGGGCGACC
AAAGGTCGCCCGACGCCCGGGCTTTGCCCGGGCGGCCTCAGTGAGCGAGCGAGCGCGCAG
Exemplary pITR.CAG.miR2-26_EGFP Construct sequence
(SEQ ID NO: 173)
CTGCGCGCTCGCTCGCTCACTGAGGCCGCCCGGGCGTCGGGCGACCTTTGGTCGCCCGGCCTCA
GTGAGCGAGCGAGCGCGCAGAGAGGGAGTGGCCAACTCCATCACTAGGGGTTCCTGCGGCCGCA
CGCGTGACATTGATTATTGACTAGTTATTAATAGTAATCAATTACGGGGTCATTAGTTCATAGC
CCATATATGGAGTTCCGCGTTACATAACTTACGGTAAATGGCCCGCCTGGCTGACCGCCCAACG
ACCCCCGCCCATTGACGTCAATAATGACGTATGTTCCCATAGTAACGCCAATAGGGACTTTCCA
TTGACGTCAATGGGTGGACTATTTACGGTAAACTGCCCACTTGGCAGTACATCAAGTGTATCAT
ATGCCAAGTACGCCCCCTATTGACGTCAATGACGGTAAATGGCCCGCCTGGCATTATGCCCAGT
ACATGACCTTATGGGACTTTCCTACTTGGCAGTACATCTACGTATTAGTCATCGCTATTACCAT
GGGTCGAGGTGAGCCCCACGTTCTGCTTCACTCTCCCCATCTCCCCCCCCTCCCCACCCCCAAT
TTTGTATTTATTTATTTTTTAATTATTTTGTGCAGCGATGGGGGCGGGGGGGGGGGGGGCGCGC
GCCAGGCGGGGCGGGGCGGGGCGAGGGGCGGGGCGGGGCGAGGCGGAGAGGTGCGGCGGCAGCC
AATCAGAGCGGCGCGCTCCGAAAGTTTCCTTTTATGGCGAGGCGGCGGCGGCGGCGGCCCTATA
AAAAGCGAAGCGCGCGGCGGGCGGGAGTCGCTGCGTTGCCTTCGCCCCGTGCCCCGCTCCGCGC
CGCCTCGCGCCGCCCGCCCCGGCTCTGACTGACCGCGTTACTCCCACAGGTGAGCGGGCGGGAC
GGCCCTTCTCCTCCGGGCTGTAATTAGCGCTTGGTTTAATGACGGCTCGTTTCTTTTCTGTGGC
TGCGTGAAAGCCTTAAAGGGCTCCGGGAGGGCCCTTTGTGCGGGGGGGAGCGGCTCGGGGGGTG
CGTGCGTGTGTGTGTGCGTGGGGAGCGCCGCGTGCGGCCCGCGCTGCCCGGCGGCTGTGAGCGC
TGCGGGCGCGGCGCGGGGCTTTGTGCGCTCCGCGTGTGCGCGAGGGGAGCGCGGCCGGGGGCGG
TGCCCCGCGGTGCGGGGGGGCTGCGAGGGGAACAAAGGCTGCGTGCGGGGTGTGTGCGTGGGGG
GGTGAGCAGGGGGTGTGGGCGCGGCGGTCGGGCTGTAACCCCCCCCTGCACCCCCCTCCCCGAG
TTGCTGAGCACGGCCCGGCTTCGGGTGCGGGGCTCCGTGCGGGGCGTGGCGCGGGGCTCGCCGT
GCCGGGCGGGGGGTGGCGGCAGGTGGGGGTGCCGGGCGGGGCGGGGCCGCCTCGGGCCGGGGAG
GGCTCGGGGGAGGGGCGCGGCGGCCCCCGGAGCGCCGGCGGAGCAGGAGGACCAAGGCCCTGGC
GAAGGCCGTGGCCTCGTTGAGTCTCAGAGATGCCCGGTGTGCAGGTCCCAATGGCCGGGTATTA
CTGAGATTCCACGGGGACGCGGGCCTGGACGCCGGCATCCGGGCTCAGGACCCCCCTCTCTAGA
GCCTCTGCTAACCATGTTCATGCCTTCTTCTTTTTCCTACAGCTCCTGGGCAACGTGCTGGTTA
TTGTGACCGGTCGCTAGCCACCATGGTGAGCAAGGGCGAGGAGCTGTTCACCGGGGTGGTGCCC
ATCCTGGTCGAGCTGGACGGCGACGTAAACGGCCACAAGTTCAGCGTGTCCGGCGAGGGCGAGG
GCGATGCCACCTACGGCAAGCTGACCCTGAAGTTCATCTGCACCACCGGCAAGCTGCCCGTGCC
CTGGCCCACCCTCGTGACCACCCTGACCTACGGCGTGCAGTGCTTCAGCCGCTACCCCGACCAC
ATGAAGCAGCACGACTTCTTCAAGTCCGCCATGCCCGAAGGCTACGTCCAGGAGCGCACCATCT
TCTTCAAGGACGACGGCAACTACAAGACCCGCGCCGAGGTGAAGTTCGAGGGCGACACCCTGGT
GAACCGCATCGAGCTGAAGGGCATCGACTTCAAGGAGGACGGCAACATCCTGGGGCACAAGCTG
GAGTACAACTACAACAGCCACAACGTCTATATCATGGCCGACAAGCAGAAGAACGGCATCAAGG
TGAACTTCAAGATCCGCCACAACATCGAGGACGGCAGCGTGCAGCTCGCCGACCACTACCAGCA
GAACACCCCCATCGGCGACGGCCCCGTGCTGCTGCCCGACAACCACTACCTGAGCACCCAGTCC
GCCCTGAGCAAAGACCCCAACGAGAAGCGCGATCACATGGTCCTGCTGGAGTTCGTGACCGCCG
CCGGGATCACTCTCGGCATGGACGAGCTGTACAAGTAAcctgcaggcgccggcgGAGCAGGAGG
ACCAAGGCCCTGGCGAAGGCCGTGGCCTCGTTGAGTCTCAGAGATGCCCGGTGTGCAGGTCCCA
ATGGCCGGGTATTACTGAGATTCCACGGGGACGCGGGCCTGGACGCCGGCATCCGGGCTCAGGA
CCCCCCTCGAGCTCGCTGATCAGCCTCGACTGTGCCTTCTAGTTGCCAGCCATCTGTTGTTTGC
CCCTCCCCCGTGCCTTCCTTGACCCTGGAAGGTGCCACTCCCACTGTCCTTTCCTAATAAAATG
AGGAAATTGCATCGCATTGTCTGAGTAGGTGTCATTCTATTCTGGGGGGTGGGGTGGGGCAGGA
CAGCAAGGGGGAGGATTGGGAAGACAATAGCAGGCATGCTGGGGATGCGGTGGGCTCTATGGAA
GCTTGAATTCAGCTGACGTGCCTCGGACCGCTAGGAACCCCTAGTGATGGAGTTGGCCACTCCC
TCTCTGCGCGCTCGCTCGCTCACTGAGGCCGGGCGACCAAAGGTCGCCCGACGCCCGGGCTTTG
CCCGGGCGGCCTCAGTGAGCGAGCGAGCGCGCAG
Exemplary pITR.CAG.miR2-96_EGFP Construct sequence
(SEQ ID NO: 174)
CTGCGCGCTCGCTCGCTCACTGAGGCCGCCCGGGCGTCGGGCGACCTTTGGTCGCCCGGCCTCA
GTGAGCGAGCGAGCGCGCAGAGAGGGAGTGGCCAACTCCATCACTAGGGGTTCCTGCGGCCGCA
CGCGTGACATTGATTATTGACTAGTTATTAATAGTAATCAATTACGGGGTCATTAGTTCATAGC
CCATATATGGAGTTCCGCGTTACATAACTTACGGTAAATGGCCCGCCTGGCTGACCGCCCAACG
ACCCCCGCCCATTGACGTCAATAATGACGTATGTTCCCATAGTAACGCCAATAGGGACTTTCCA
TTGACGTCAATGGGTGGACTATTTACGGTAAACTGCCCACTTGGCAGTACATCAAGTGTATCAT
ATGCCAAGTACGCCCCCTATTGACGTCAATGACGGTAAATGGCCCGCCTGGCATTATGCCCAGT
ACATGACCTTATGGGACTTTCCTACTTGGCAGTACATCTACGTATTAGTCATCGCTATTACCAT
GGGTCGAGGTGAGCCCCACGTTCTGCTTCACTCTCCCCATCTCCCCCCCCTCCCCACCCCCAAT
TTTGTATTTATTTATTTTTTAATTATTTTGTGCAGCGATGGGGGCGGGGGGGGGGGGGGCGCGC
GCCAGGCGGGGCGGGGCGGGGCGAGGGGCGGGGCGGGGCGAGGCGGAGAGGTGCGGCGGCAGCC
AATCAGAGCGGCGCGCTCCGAAAGTTTCCTTTTATGGCGAGGCGGCGGCGGCGGCGGCCCTATA
AAAAGCGAAGCGCGCGGCGGGCGGGAGTCGCTGCGTTGCCTTCGCCCCGTGCCCCGCTCCGCGC
CGCCTCGCGCCGCCCGCCCCGGCTCTGACTGACCGCGTTACTCCCACAGGTGAGCGGGCGGGAC
GGCCCTTCTCCTCCGGGCTGTAATTAGCGCTTGGTTTAATGACGGCTCGTTTCTTTTCTGTGGC
TGCGTGAAAGCCTTAAAGGGCTCCGGGAGGGCCCTTTGTGCGGGGGGGAGCGGCTCGGGGGGTG
CGTGCGTGTGTGTGTGCGTGGGGAGCGCCGCGTGCGGCCCGCGCTGCCCGGCGGCTGTGAGCGC
TGCGGGCGCGGCGCGGGGCTTTGTGCGCTCCGCGTGTGCGCGAGGGGAGCGCGGCCGGGGGCGG
TGCCCCGCGGTGCGGGGGGGCTGCGAGGGGAACAAAGGCTGCGTGCGGGGTGTGTGCGTGGGGG
GGTGAGCAGGGGGTGTGGGCGCGGCGGTCGGGCTGTAACCCCCCCCTGCACCCCCCTCCCCGAG
TTGCTGAGCACGGCCCGGCTTCGGGTGCGGGGCTCCGTGCGGGGCGTGGCGCGGGGCTCGCCGT
GCCGGGCGGGGGGTGGCGGCAGGTGGGGGTGCCGGGCGGGGCGGGGCCGCCTCGGGCCGGGGAG
GGCTCGGGGGAGGGGCGCGGCGGCCCCCGGAGCGCCGGCGGTGTCCCCAGAGAGCCCGCACCAG
TGCCATCTGCTTGGCCGATTTGAGTCTCAGAGATGCCCggCTTGTGTCTCTCCGCTCTGAGCTG
TCTGTCTCGAGGCTCATATGGGAAAAGCAGGACCCGCAGCTGCGTCCGCCTCCCCTGCATTCTA
GAGCCTCTGCTAACCATGTTCATGCCTTCTTCTTTTTCCTACAGCTCCTGGGCAACGTGCTGGT
TATTGTGACCGGTCGCTAGCCACCATGGTGAGCAAGGGCGAGGAGCTGTTCACCGGGGTGGTGC
CCATCCTGGTCGAGCTGGACGGCGACGTAAACGGCCACAAGTTCAGCGTGTCCGGCGAGGGCGA
GGGCGATGCCACCTACGGCAAGCTGACCCTGAAGTTCATCTGCACCACCGGCAAGCTGCCCGTG
CCCTGGCCCACCCTCGTGACCACCCTGACCTACGGCGTGCAGTGCTTCAGCCGCTACCCCGACC
ACATGAAGCAGCACGACTTCTTCAAGTCCGCCATGCCCGAAGGCTACGTCCAGGAGCGCACCAT
CTTCTTCAAGGACGACGGCAACTACAAGACCCGCGCCGAGGTGAAGTTCGAGGGCGACACCCTG
GTGAACCGCATCGAGCTGAAGGGCATCGACTTCAAGGAGGACGGCAACATCCTGGGGCACAAGC
TGGAGTACAACTACAACAGCCACAACGTCTATATCATGGCCGACAAGCAGAAGAACGGCATCAA
GGTGAACTTCAAGATCCGCCACAACATCGAGGACGGCAGCGTGCAGCTCGCCGACCACTACCAG
CAGAACACCCCCATCGGCGACGGCCCCGTGCTGCTGCCCGACAACCACTACCTGAGCACCCAGT
CCGCCCTGAGCAAAGACCCCAACGAGAAGCGCGATCACATGGTCCTGCTGGAGTTCGTGACCGC
CGCCGGGATCACTCTCGGCATGGACGAGCTGTACAAGTAAcctgcaggcgccggcgGTGTCCCC
AGAGAGCCCGCACCAGTGCCATCTGCTTGGCCGATTTGAGTCTCAGAGATGCCCggCTTGTGTC
TCTCCGCTCTGAGCTGTCTGTCTCGAGGCTCATATGGGAAAAGCAGGACCCGCAGCTGCGTCCG
CCTCCCCTGCATGAGCTCGCTGATCAGCCTCGACTGTGCCTTCTAGTTGCCAGCCATCTGTTGT
TTGCCCCTCCCCCGTGCCTTCCTTGACCCTGGAAGGTGCCACTCCCACTGTCCTTTCCTAATAA
AATGAGGAAATTGCATCGCATTGTCTGAGTAGGTGTCATTCTATTCTGGGGGGTGGGGTGGGGC
AGGACAGCAAGGGGGAGGATTGGGAAGACAATAGCAGGCATGCTGGGGATGCGGTGGGCTCTAT
GGAAGCTTGAATTCAGCTGACGTGCCTCGGACCGCTAGGAACCCCTAGTGATGGAGTTGGCCAC
TCCCTCTCTGCGCGCTCGCTCGCTCACTGAGGCCGGGCGACCAAAGGTCGCCCGACGCCCGGGC
TTTGCCCGGGCGGCCTCAGTGAGCGAGCGAGCGCGCAG
Exemplary pITR.CAG.miR2i_miR4u-16_EGFP Construct sequence
(SEQ ID NO: 175)
CTGCGCGCTCGCTCGCTCACTGAGGCCGCCCGGGCGTCGGGCGACCTTTGGTCGCCCGGCCTCA
GTGAGCGAGCGAGCGCGCAGAGAGGGAGTGGCCAACTCCATCACTAGGGGTTCCTGCGGCCGCA
CGCGTGACATTGATTATTGACTAGTTATTAATAGTAATCAATTACGGGGTCATTAGTTCATAGC
CCATATATGGAGTTCCGCGTTACATAACTTACGGTAAATGGCCCGCCTGGCTGACCGCCCAACG
ACCCCCGCCCATTGACGTCAATAATGACGTATGTTCCCATAGTAACGCCAATAGGGACTTTCCA
TTGACGTCAATGGGTGGACTATTTACGGTAAACTGCCCACTTGGCAGTACATCAAGTGTATCAT
ATGCCAAGTACGCCCCCTATTGACGTCAATGACGGTAAATGGCCCGCCTGGCATTATGCCCAGT
ACATGACCTTATGGGACTTTCCTACTTGGCAGTACATCTACGTATTAGTCATCGCTATTACCAT
GGGTCGAGGTGAGCCCCACGTTCTGCTTCACTCTCCCCATCTCCCCCCCCTCCCCACCCCCAAT
TTTGTATTTATTTATTTTTTAATTATTTTGTGCAGCGATGGGGGCGGGGGGGGGGGGGGCGCGC
GCCAGGCGGGGCGGGGCGGGGCGAGGGGCGGGGCGGGGCGAGGCGGAGAGGTGCGGCGGCAGCC
AATCAGAGCGGCGCGCTCCGAAAGTTTCCTTTTATGGCGAGGCGGCGGCGGCGGCGGCCCTATA
AAAAGCGAAGCGCGCGGCGGGCGGGAGTCGCTGCGTTGCCTTCGCCCCGTGCCCCGCTCCGCGC
CGCCTCGCGCCGCCCGCCCCGGCTCTGACTGACCGCGTTACTCCCACAGGTGAGCGGGCGGGAC
GGCCCTTCTCCTCCGGGCTGTAATTAGCGCTTGGTTTAATGACGGCTCGTTTCTTTTCTGTGGC
TGCGTGAAAGCCTTAAAGGGCTCCGGGAGGGCCCTTTGTGCGGGGGGGAGCGGCTCGGGGGGTG
CGTGCGTGTGTGTGTGCGTGGGGAGCGCCGCGTGCGGCCCGCGCTGCCCGGCGGCTGTGAGCGC
TGCGGGCGCGGCGCGGGGCTTTGTGCGCTCCGCGTGTGCGCGAGGGGAGCGCGGCCGGGGGCGG
TGCCCCGCGGTGCGGGGGGGCTGCGAGGGGAACAAAGGCTGCGTGCGGGGTGTGTGCGTGGGGG
GGTGAGCAGGGGGTGTGGGCGCGGCGGTCGGGCTGTAACCCCCCCCTGCACCCCCCTCCCCGAG
TTGCTGAGCACGGCCCGGCTTCGGGTGCGGGGCTCCGTGCGGGGCGTGGCGCGGGGCTCGCCGT
GCCGGGCGGGGGGTGGCGGCAGGTGGGGGTGCCGGGCGGGGCGGGGCCGCCTCGGGCCGGGGAG
GGCTCGGGGGAGGGGCGCGGCGGCCCCCGGAGCGCCGGCGCATAGCTCTTATGATAGCAATGTC
AGCAGTGCCTTTGAGTCTCAGAGATGCCCGGGTTAAGATTCTAAAATTATCACGGGTATTACTT
GAGGCTCAGAAGTAAGGTTGACCATACTCTACAGTTGTGTCTAGAGCCTCTGCTAACCATGTTC
ATGCCTTCTTCTTTTTCCTACAGCTCCTGGGCAACGTGCTGGTTATTGTGACCGGTCGCTAGCC
ACCATGGTGAGCAAGGGCGAGGAGCTGTTCACCGGGGTGGTGCCCATCCTGGTCGAGCTGGACG
GCGACGTAAACGGCCACAAGTTCAGCGTGTCCGGCGAGGGCGAGGGCGATGCCACCTACGGCAA
GCTGACCCTGAAGTTCATCTGCACCACCGGCAAGCTGCCCGTGCCCTGGCCCACCCTCGTGACC
ACCCTGACCTACGGCGTGCAGTGCTTCAGCCGCTACCCCGACCACATGAAGCAGCACGACTTCT
TCAAGTCCGCCATGCCCGAAGGCTACGTCCAGGAGCGCACCATCTTCTTCAAGGACGACGGCAA
CTACAAGACCCGCGCCGAGGTGAAGTTCGAGGGCGACACCCTGGTGAACCGCATCGAGCTGAAG
GGCATCGACTTCAAGGAGGACGGCAACATCCTGGGGCACAAGCTGGAGTACAACTACAACAGCC
ACAACGTCTATATCATGGCCGACAAGCAGAAGAACGGCATCAAGGTGAACTTCAAGATCCGCCA
CAACATCGAGGACGGCAGCGTGCAGCTCGCCGACCACTACCAGCAGAACACCCCCATCGGCGAC
GGCCCCGTGCTGCTGCCCGACAACCACTACCTGAGCACCCAGTCCGCCCTGAGCAAAGACCCCA
ACGAGAAGCGCGATCACATGGTCCTGCTGGAGTTCGTGACCGCCGCCGGGATCACTCTCGGCAT
GGACGAGCTGTACAAGTAAcctgcaggcgccggcgCATAGCTCTTATGATAGCAATGTCAGCAG
TGCCTTTCTCGAAGTGCTTCTGCCGGGTTAAGATTCTAAAATTATCACGGTAGAAACATCTTCG
GGAGAAGTAAGGTTGACCATACTCTACAGTTGTGGAGCTCGCTGATCAGCCTCGACTGTGCCTT
CTAGTTGCCAGCCATCTGTTGTTTGCCCCTCCCCCGTGCCTTCCTTGACCCTGGAAGGTGCCAC
TCCCACTGTCCTTTCCTAATAAAATGAGGAAATTGCATCGCATTGTCTGAGTAGGTGTCATTCT
ATTCTGGGGGGTGGGGTGGGGCAGGACAGCAAGGGGGAGGATTGGGAAGACAATAGCAGGCATG
CTGGGGATGCGGTGGGCTCTATGGAAGCTTGAATTCAGCTGACGTGCCTCGGACCGCTAGGAAC
CCCTAGTGATGGAGTTGGCCACTCCCTCTCTGCGCGCTCGCTCGCTCACTGAGGCCGGGCGACC
AAAGGTCGCCCGACGCCCGGGCTTTGCCCGGGCGGCCTCAGTGAGCGAGCGAGCGCGCAG
Exemplary pITR.CAG.miR2i_miR4u-26_EGFP Construct sequence
(SEQ ID NO: 176)
CTGCGCGCTCGCTCGCTCACTGAGGCCGCCCGGGCGTCGGGCGACCTTTGGTCGCCCGGCCTCA
GTGAGCGAGCGAGCGCGCAGAGAGGGAGTGGCCAACTCCATCACTAGGGGTTCCTGCGGCCGCA
CGCGTGACATTGATTATTGACTAGTTATTAATAGTAATCAATTACGGGGTCATTAGTTCATAGC
CCATATATGGAGTTCCGCGTTACATAACTTACGGTAAATGGCCCGCCTGGCTGACCGCCCAACG
ACCCCCGCCCATTGACGTCAATAATGACGTATGTTCCCATAGTAACGCCAATAGGGACTTTCCA
TTGACGTCAATGGGTGGACTATTTACGGTAAACTGCCCACTTGGCAGTACATCAAGTGTATCAT
ATGCCAAGTACGCCCCCTATTGACGTCAATGACGGTAAATGGCCCGCCTGGCATTATGCCCAGT
ACATGACCTTATGGGACTTTCCTACTTGGCAGTACATCTACGTATTAGTCATCGCTATTACCAT
GGGTCGAGGTGAGCCCCACGTTCTGCTTCACTCTCCCCATCTCCCCCCCCTCCCCACCCCCAAT
TTTGTATTTATTTATTTTTTAATTATTTTGTGCAGCGATGGGGGCGGGGGGGGGGGGGGCGCGC
GCCAGGCGGGGCGGGGCGGGGCGAGGGGCGGGGCGGGGCGAGGCGGAGAGGTGCGGCGGCAGCC
AATCAGAGCGGCGCGCTCCGAAAGTTTCCTTTTATGGCGAGGCGGCGGCGGCGGCGGCCCTATA
AAAAGCGAAGCGCGCGGCGGGCGGGAGTCGCTGCGTTGCCTTCGCCCCGTGCCCCGCTCCGCGC
CGCCTCGCGCCGCCCGCCCCGGCTCTGACTGACCGCGTTACTCCCACAGGTGAGCGGGCGGGAC
GGCCCTTCTCCTCCGGGCTGTAATTAGCGCTTGGTTTAATGACGGCTCGTTTCTTTTCTGTGGC
TGCGTGAAAGCCTTAAAGGGCTCCGGGAGGGCCCTTTGTGCGGGGGGGAGCGGCTCGGGGGGTG
CGTGCGTGTGTGTGTGCGTGGGGAGCGCCGCGTGCGGCCCGCGCTGCCCGGCGGCTGTGAGCGC
TGCGGGCGCGGCGCGGGGCTTTGTGCGCTCCGCGTGTGCGCGAGGGGAGCGCGGCCGGGGGCGG
TGCCCCGCGGTGCGGGGGGGCTGCGAGGGGAACAAAGGCTGCGTGCGGGGTGTGTGCGTGGGGG
GGTGAGCAGGGGGTGTGGGCGCGGCGGTCGGGCTGTAACCCCCCCCTGCACCCCCCTCCCCGAG
TTGCTGAGCACGGCCCGGCTTCGGGTGCGGGGCTCCGTGCGGGGCGTGGCGCGGGGCTCGCCGT
GCCGGGCGGGGGGTGGCGGCAGGTGGGGGTGCCGGGCGGGGCGGGGCCGCCTCGGGCCGGGGAG
GGCTCGGGGGAGGGGCGCGGCGGCCCCCGGAGCGCCGGCGGAGCAGGAGGACCAAGGCCCTGGC
GAAGGCCGTGGCCTCGTTGAGTCTCAGAGATGCCCGGTGTGCAGGTCCCAATGGCCGGGTATTA
CTGAGATTCCACGGGGACGCGGGCCTGGACGCCGGCATCCGGGCTCAGGACCCCCCTCTCTAGA
GCCTCTGCTAACCATGTTCATGCCTTCTTCTTTTTCCTACAGCTCCTGGGCAACGTGCTGGTTA
TTGTGACCGGTCGCTAGCCACCATGGTGAGCAAGGGCGAGGAGCTGTTCACCGGGGTGGTGCCC
ATCCTGGTCGAGCTGGACGGCGACGTAAACGGCCACAAGTTCAGCGTGTCCGGCGAGGGCGAGG
GCGATGCCACCTACGGCAAGCTGACCCTGAAGTTCATCTGCACCACCGGCAAGCTGCCCGTGCC
CTGGCCCACCCTCGTGACCACCCTGACCTACGGCGTGCAGTGCTTCAGCCGCTACCCCGACCAC
ATGAAGCAGCACGACTTCTTCAAGTCCGCCATGCCCGAAGGCTACGTCCAGGAGCGCACCATCT
TCTTCAAGGACGACGGCAACTACAAGACCCGCGCCGAGGTGAAGTTCGAGGGCGACACCCTGGT
GAACCGCATCGAGCTGAAGGGCATCGACTTCAAGGAGGACGGCAACATCCTGGGGCACAAGCTG
GAGTACAACTACAACAGCCACAACGTCTATATCATGGCCGACAAGCAGAAGAACGGCATCAAGG
TGAACTTCAAGATCCGCCACAACATCGAGGACGGCAGCGTGCAGCTCGCCGACCACTACCAGCA
GAACACCCCCATCGGCGACGGCCCCGTGCTGCTGCCCGACAACCACTACCTGAGCACCCAGTCC
GCCCTGAGCAAAGACCCCAACGAGAAGCGCGATCACATGGTCCTGCTGGAGTTCGTGACCGCCG
CCGGGATCACTCTCGGCATGGACGAGCTGTACAAGTAAcctgcaggcgccggcgGAGCAGGAGG
ACCAAGGCCCTGGCGAAGGCCGTGGCCTCGTTCTCGAAGTGCTTCTGCCGGTGTGCAGGTCCCA
ATGGCCGGTAGAATCGTTTCGAGCACGGGGACGCGGGCCTGGACGCCGGCATCCGGGCTCAGGA
CCCCCCTCGAGCTCGCTGATCAGCCTCGACTGTGCCTTCTAGTTGCCAGCCATCTGTTGTTTGC
CCCTCCCCCGTGCCTTCCTTGACCCTGGAAGGTGCCACTCCCACTGTCCTTTCCTAATAAAATG
AGGAAATTGCATCGCATTGTCTGAGTAGGTGTCATTCTATTCTGGGGGGTGGGGTGGGGCAGGA
CAGCAAGGGGGAGGATTGGGAAGACAATAGCAGGCATGCTGGGGATGCGGTGGGCTCTATGGAA
GCTTGAATTCAGCTGACGTGCCTCGGACCGCTAGGAACCCCTAGTGATGGAGTTGGCCACTCCC
TCTCTGCGCGCTCGCTCGCTCACTGAGGCCGGGCGACCAAAGGTCGCCCGACGCCCGGGCTTTG
CCCGGGCGGCCTCAGTGAGCGAGCGAGCGCGCAG
Exemplary pITR.CAG.miR2i_miR4u-96_EGFP Construct sequence
(SEQ ID NO: 177)
CTGCGCGCTCGCTCGCTCACTGAGGCCGCCCGGGCGTCGGGCGACCTTTGGTCGCCCGGCCTCA
GTGAGCGAGCGAGCGCGCAGAGAGGGAGTGGCCAACTCCATCACTAGGGGTTCCTGCGGCCGCA
CGCGTGACATTGATTATTGACTAGTTATTAATAGTAATCAATTACGGGGTCATTAGTTCATAGC
CCATATATGGAGTTCCGCGTTACATAACTTACGGTAAATGGCCCGCCTGGCTGACCGCCCAACG
ACCCCCGCCCATTGACGTCAATAATGACGTATGTTCCCATAGTAACGCCAATAGGGACTTTCCA
TTGACGTCAATGGGTGGACTATTTACGGTAAACTGCCCACTTGGCAGTACATCAAGTGTATCAT
ATGCCAAGTACGCCCCCTATTGACGTCAATGACGGTAAATGGCCCGCCTGGCATTATGCCCAGT
ACATGACCTTATGGGACTTTCCTACTTGGCAGTACATCTACGTATTAGTCATCGCTATTACCAT
GGGTCGAGGTGAGCCCCACGTTCTGCTTCACTCTCCCCATCTCCCCCCCCTCCCCACCCCCAAT
TTTGTATTTATTTATTTTTTAATTATTTTGTGCAGCGATGGGGGCGGGGGGGGGGGGGGCGCGC
GCCAGGCGGGGCGGGGCGGGGCGAGGGGCGGGGCGGGGCGAGGCGGAGAGGTGCGGCGGCAGCC
AATCAGAGCGGCGCGCTCCGAAAGTTTCCTTTTATGGCGAGGCGGCGGCGGCGGCGGCCCTATA
AAAAGCGAAGCGCGCGGCGGGCGGGAGTCGCTGCGTTGCCTTCGCCCCGTGCCCCGCTCCGCGC
CGCCTCGCGCCGCCCGCCCCGGCTCTGACTGACCGCGTTACTCCCACAGGTGAGCGGGCGGGAC
GGCCCTTCTCCTCCGGGCTGTAATTAGCGCTTGGTTTAATGACGGCTCGTTTCTTTTCTGTGGC
TGCGTGAAAGCCTTAAAGGGCTCCGGGAGGGCCCTTTGTGCGGGGGGGAGCGGCTCGGGGGGTG
CGTGCGTGTGTGTGTGCGTGGGGAGCGCCGCGTGCGGCCCGCGCTGCCCGGCGGCTGTGAGCGC
TGCGGGCGCGGCGCGGGGCTTTGTGCGCTCCGCGTGTGCGCGAGGGGAGCGCGGCCGGGGGCGG
TGCCCCGCGGTGCGGGGGGGCTGCGAGGGGAACAAAGGCTGCGTGCGGGGTGTGTGCGTGGGGG
GGTGAGCAGGGGGTGTGGGCGCGGCGGTCGGGCTGTAACCCCCCCCTGCACCCCCCTCCCCGAG
TTGCTGAGCACGGCCCGGCTTCGGGTGCGGGGCTCCGTGCGGGGCGTGGCGCGGGGCTCGCCGT
GCCGGGCGGGGGGTGGCGGCAGGTGGGGGTGCCGGGCGGGGCGGGGCCGCCTCGGGCCGGGGAG
GGCTCGGGGGAGGGGCGCGGCGGCCCCCGGAGCGCCGGCGGTGTCCCCAGAGAGCCCGCACCAG
TGCCATCTGCTTGGCCGATTTGAGTCTCAGAGATGCCCggCTTGTGTCTCTCCGCTCTGAGCTG
TCTGTCTCGAGGCTCATATGGGAAAAGCAGGACCCGCAGCTGCGTCCGCCTCCCCTGCATTCTA
GAGCCTCTGCTAACCATGTTCATGCCTTCTTCTTTTTCCTACAGCTCCTGGGCAACGTGCTGGT
TATTGTGACCGGTCGCTAGCCACCATGGTGAGCAAGGGCGAGGAGCTGTTCACCGGGGTGGTGC
CCATCCTGGTCGAGCTGGACGGCGACGTAAACGGCCACAAGTTCAGCGTGTCCGGCGAGGGCGA
GGGCGATGCCACCTACGGCAAGCTGACCCTGAAGTTCATCTGCACCACCGGCAAGCTGCCCGTG
CCCTGGCCCACCCTCGTGACCACCCTGACCTACGGCGTGCAGTGCTTCAGCCGCTACCCCGACC
ACATGAAGCAGCACGACTTCTTCAAGTCCGCCATGCCCGAAGGCTACGTCCAGGAGCGCACCAT
CTTCTTCAAGGACGACGGCAACTACAAGACCCGCGCCGAGGTGAAGTTCGAGGGCGACACCCTG
GTGAACCGCATCGAGCTGAAGGGCATCGACTTCAAGGAGGACGGCAACATCCTGGGGCACAAGC
TGGAGTACAACTACAACAGCCACAACGTCTATATCATGGCCGACAAGCAGAAGAACGGCATCAA
GGTGAACTTCAAGATCCGCCACAACATCGAGGACGGCAGCGTGCAGCTCGCCGACCACTACCAG
CAGAACACCCCCATCGGCGACGGCCCCGTGCTGCTGCCCGACAACCACTACCTGAGCACCCAGT
CCGCCCTGAGCAAAGACCCCAACGAGAAGCGCGATCACATGGTCCTGCTGGAGTTCGTGACCGC
CGCCGGGATCACTCTCGGCATGGACGAGCTGTACAAGTAAcctgcaggcgccggcgGTGTCCCC
AGAGAGCCCGCACCAGTGCCATCTGCTTGGCCGATTTCTCGAAGTGCTTCTGCCGGCTTGTGTC
TCTCCGCTCTGAGCTGTGAGGAGCTTTCGGGATATGGGAAAAGCAGGACCCGCAGCTGCGTCCG
CCTCCCCTGCATGAGCTCGCTGATCAGCCTCGACTGTGCCTTCTAGTTGCCAGCCATCTGTTGT
TTGCCCCTCCCCCGTGCCTTCCTTGACCCTGGAAGGTGCCACTCCCACTGTCCTTTCCTAATAA
AATGAGGAAATTGCATCGCATTGTCTGAGTAGGTGTCATTCTATTCTGGGGGGTGGGGTGGGGC
AGGACAGCAAGGGGGAGGATTGGGAAGACAATAGCAGGCATGCTGGGGATGCGGTGGGCTCTAT
GGAAGCTTGAATTCAGCTGACGTGCCTCGGACCGCTAGGAACCCCTAGTGATGGAGTTGGCCAC
TCCCTCTCTGCGCGCTCGCTCGCTCACTGAGGCCGGGCGACCAAAGGTCGCCCGACGCCCGGGC
TTTGCCCGGGCGGCCTCAGTGAGCGAGCGAGCGCGCAG
Exemplary pITR.CAG.miR2i_miR5u-16_EGFP Construct sequence
(SEQ ID NO: 178)
CTGCGCGCTCGCTCGCTCACTGAGGCCGCCCGGGCGTCGGGCGACCTTTGGTCGCCCGGCCTCA
GTGAGCGAGCGAGCGCGCAGAGAGGGAGTGGCCAACTCCATCACTAGGGGTTCCTGCGGCCGCA
CGCGTGACATTGATTATTGACTAGTTATTAATAGTAATCAATTACGGGGTCATTAGTTCATAGC
CCATATATGGAGTTCCGCGTTACATAACTTACGGTAAATGGCCCGCCTGGCTGACCGCCCAACG
ACCCCCGCCCATTGACGTCAATAATGACGTATGTTCCCATAGTAACGCCAATAGGGACTTTCCA
TTGACGTCAATGGGTGGACTATTTACGGTAAACTGCCCACTTGGCAGTACATCAAGTGTATCAT
ATGCCAAGTACGCCCCCTATTGACGTCAATGACGGTAAATGGCCCGCCTGGCATTATGCCCAGT
ACATGACCTTATGGGACTTTCCTACTTGGCAGTACATCTACGTATTAGTCATCGCTATTACCAT
GGGTCGAGGTGAGCCCCACGTTCTGCTTCACTCTCCCCATCTCCCCCCCCTCCCCACCCCCAAT
TTTGTATTTATTTATTTTTTAATTATTTTGTGCAGCGATGGGGGCGGGGGGGGGGGGGGCGCGC
GCCAGGCGGGGCGGGGCGGGGCGAGGGGCGGGGCGGGGCGAGGCGGAGAGGTGCGGCGGCAGCC
AATCAGAGCGGCGCGCTCCGAAAGTTTCCTTTTATGGCGAGGCGGCGGCGGCGGCGGCCCTATA
AAAAGCGAAGCGCGCGGCGGGCGGGAGTCGCTGCGTTGCCTTCGCCCCGTGCCCCGCTCCGCGC
CGCCTCGCGCCGCCCGCCCCGGCTCTGACTGACCGCGTTACTCCCACAGGTGAGCGGGCGGGAC
GGCCCTTCTCCTCCGGGCTGTAATTAGCGCTTGGTTTAATGACGGCTCGTTTCTTTTCTGTGGC
TGCGTGAAAGCCTTAAAGGGCTCCGGGAGGGCCCTTTGTGCGGGGGGGAGCGGCTCGGGGGGTG
CGTGCGTGTGTGTGTGCGTGGGGAGCGCCGCGTGCGGCCCGCGCTGCCCGGCGGCTGTGAGCGC
TGCGGGCGCGGCGCGGGGCTTTGTGCGCTCCGCGTGTGCGCGAGGGGAGCGCGGCCGGGGGCGG
TGCCCCGCGGTGCGGGGGGGCTGCGAGGGGAACAAAGGCTGCGTGCGGGGTGTGTGCGTGGGGG
GGTGAGCAGGGGGTGTGGGCGCGGCGGTCGGGCTGTAACCCCCCCCTGCACCCCCCTCCCCGAG
TTGCTGAGCACGGCCCGGCTTCGGGTGCGGGGCTCCGTGCGGGGCGTGGCGCGGGGCTCGCCGT
GCCGGGCGGGGGGTGGCGGCAGGTGGGGGTGCCGGGCGGGGCGGGGCCGCCTCGGGCCGGGGAG
GGCTCGGGGGAGGGGCGCGGCGGCCCCCGGAGCGCCGGCGCATAGCTCTTATGATAGCAATGTC
AGCAGTGCCTTTGAGTCTCAGAGATGCCCGGGTTAAGATTCTAAAATTATCACGGGTATTACTT
GAGGCTCAGAAGTAAGGTTGACCATACTCTACAGTTGTGTCTAGAGCCTCTGCTAACCATGTTC
ATGCCTTCTTCTTTTTCCTACAGCTCCTGGGCAACGTGCTGGTTATTGTGACCGGTCGCTAGCC
ACCATGGTGAGCAAGGGCGAGGAGCTGTTCACCGGGGTGGTGCCCATCCTGGTCGAGCTGGACG
GCGACGTAAACGGCCACAAGTTCAGCGTGTCCGGCGAGGGCGAGGGCGATGCCACCTACGGCAA
GCTGACCCTGAAGTTCATCTGCACCACCGGCAAGCTGCCCGTGCCCTGGCCCACCCTCGTGACC
ACCCTGACCTACGGCGTGCAGTGCTTCAGCCGCTACCCCGACCACATGAAGCAGCACGACTTCT
TCAAGTCCGCCATGCCCGAAGGCTACGTCCAGGAGCGCACCATCTTCTTCAAGGACGACGGCAA
CTACAAGACCCGCGCCGAGGTGAAGTTCGAGGGCGACACCCTGGTGAACCGCATCGAGCTGAAG
GGCATCGACTTCAAGGAGGACGGCAACATCCTGGGGCACAAGCTGGAGTACAACTACAACAGCC
ACAACGTCTATATCATGGCCGACAAGCAGAAGAACGGCATCAAGGTGAACTTCAAGATCCGCCA
CAACATCGAGGACGGCAGCGTGCAGCTCGCCGACCACTACCAGCAGAACACCCCCATCGGCGAC
GGCCCCGTGCTGCTGCCCGACAACCACTACCTGAGCACCCAGTCCGCCCTGAGCAAAGACCCCA
ACGAGAAGCGCGATCACATGGTCCTGCTGGAGTTCGTGACCGCCGCCGGGATCACTCTCGGCAT
GGACGAGCTGTACAAGTAAcctgcaggcgccggcgCATAGCTCTTATGATAGCAATGTCAGCAG
TGCCTTTCTCCACCTTGACCACGCGTGTTAAGATTCTAAAATTATCTCGTGTGGTAAGTGGTGG
AGAGAAGTAAGGTTGACCATACTCTACAGTTGTGGAGCTCGCTGATCAGCCTCGACTGTGCCTT
CTAGTTGCCAGCCATCTGTTGTTTGCCCCTCCCCCGTGCCTTCCTTGACCCTGGAAGGTGCCAC
TCCCACTGTCCTTTCCTAATAAAATGAGGAAATTGCATCGCATTGTCTGAGTAGGTGTCATTCT
ATTCTGGGGGGTGGGGTGGGGCAGGACAGCAAGGGGGAGGATTGGGAAGACAATAGCAGGCATG
CTGGGGATGCGGTGGGCTCTATGGAAGCTTGAATTCAGCTGACGTGCCTCGGACCGCTAGGAAC
CCCTAGTGATGGAGTTGGCCACTCCCTCTCTGCGCGCTCGCTCGCTCACTGAGGCCGGGCGACC
AAAGGTCGCCCGACGCCCGGGCTTTGCCCGGGCGGCCTCAGTGAGCGAGCGAGCGCGCAG
Exemplary pITR.CAG.miR2i_miR5u-26_EGFP Construct sequence
(SEQ ID NO: 179)
CTGCGCGCTCGCTCGCTCACTGAGGCCGCCCGGGCGTCGGGCGACCTTTGGTCGCCCGGCCTCA
GTGAGCGAGCGAGCGCGCAGAGAGGGAGTGGCCAACTCCATCACTAGGGGTTCCTGCGGCCGCA
CGCGTGACATTGATTATTGACTAGTTATTAATAGTAATCAATTACGGGGTCATTAGTTCATAGC
CCATATATGGAGTTCCGCGTTACATAACTTACGGTAAATGGCCCGCCTGGCTGACCGCCCAACG
ACCCCCGCCCATTGACGTCAATAATGACGTATGTTCCCATAGTAACGCCAATAGGGACTTTCCA
TTGACGTCAATGGGTGGACTATTTACGGTAAACTGCCCACTTGGCAGTACATCAAGTGTATCAT
ATGCCAAGTACGCCCCCTATTGACGTCAATGACGGTAAATGGCCCGCCTGGCATTATGCCCAGT
ACATGACCTTATGGGACTTTCCTACTTGGCAGTACATCTACGTATTAGTCATCGCTATTACCAT
GGGTCGAGGTGAGCCCCACGTTCTGCTTCACTCTCCCCATCTCCCCCCCCTCCCCACCCCCAAT
TTTGTATTTATTTATTTTTTAATTATTTTGTGCAGCGATGGGGGCGGGGGGGGGGGGGGCGCGC
GCCAGGCGGGGCGGGGCGGGGCGAGGGGCGGGGCGGGGCGAGGCGGAGAGGTGCGGCGGCAGCC
AATCAGAGCGGCGCGCTCCGAAAGTTTCCTTTTATGGCGAGGCGGCGGCGGCGGCGGCCCTATA
AAAAGCGAAGCGCGCGGCGGGCGGGAGTCGCTGCGTTGCCTTCGCCCCGTGCCCCGCTCCGCGC
CGCCTCGCGCCGCCCGCCCCGGCTCTGACTGACCGCGTTACTCCCACAGGTGAGCGGGCGGGAC
GGCCCTTCTCCTCCGGGCTGTAATTAGCGCTTGGTTTAATGACGGCTCGTTTCTTTTCTGTGGC
TGCGTGAAAGCCTTAAAGGGCTCCGGGAGGGCCCTTTGTGCGGGGGGGAGCGGCTCGGGGGGTG
CGTGCGTGTGTGTGTGCGTGGGGAGCGCCGCGTGCGGCCCGCGCTGCCCGGCGGCTGTGAGCGC
TGCGGGCGCGGCGCGGGGCTTTGTGCGCTCCGCGTGTGCGCGAGGGGAGCGCGGCCGGGGGCGG
TGCCCCGCGGTGCGGGGGGGCTGCGAGGGGAACAAAGGCTGCGTGCGGGGTGTGTGCGTGGGGG
GGTGAGCAGGGGGTGTGGGCGCGGCGGTCGGGCTGTAACCCCCCCCTGCACCCCCCTCCCCGAG
TTGCTGAGCACGGCCCGGCTTCGGGTGCGGGGCTCCGTGCGGGGCGTGGCGCGGGGCTCGCCGT
GCCGGGCGGGGGGTGGCGGCAGGTGGGGGTGCCGGGCGGGGCGGGGCCGCCTCGGGCCGGGGAG
GGCTCGGGGGAGGGGCGCGGCGGCCCCCGGAGCGCCGGCGGAGCAGGAGGACCAAGGCCCTGGC
GAAGGCCGTGGCCTCGTTGAGTCTCAGAGATGCCCGGTGTGCAGGTCCCAATGGCCGGGTATTA
CTGAGATTCCACGGGGACGCGGGCCTGGACGCCGGCATCCGGGCTCAGGACCCCCCTCTCTAGA
GCCTCTGCTAACCATGTTCATGCCTTCTTCTTTTTCCTACAGCTCCTGGGCAACGTGCTGGTTA
TTGTGACCGGTCGCTAGCCACCATGGTGAGCAAGGGCGAGGAGCTGTTCACCGGGGTGGTGCCC
ATCCTGGTCGAGCTGGACGGCGACGTAAACGGCCACAAGTTCAGCGTGTCCGGCGAGGGCGAGG
GCGATGCCACCTACGGCAAGCTGACCCTGAAGTTCATCTGCACCACCGGCAAGCTGCCCGTGCC
CTGGCCCACCCTCGTGACCACCCTGACCTACGGCGTGCAGTGCTTCAGCCGCTACCCCGACCAC
ATGAAGCAGCACGACTTCTTCAAGTCCGCCATGCCCGAAGGCTACGTCCAGGAGCGCACCATCT
TCTTCAAGGACGACGGCAACTACAAGACCCGCGCCGAGGTGAAGTTCGAGGGCGACACCCTGGT
GAACCGCATCGAGCTGAAGGGCATCGACTTCAAGGAGGACGGCAACATCCTGGGGCACAAGCTG
GAGTACAACTACAACAGCCACAACGTCTATATCATGGCCGACAAGCAGAAGAACGGCATCAAGG
TGAACTTCAAGATCCGCCACAACATCGAGGACGGCAGCGTGCAGCTCGCCGACCACTACCAGCA
GAACACCCCCATCGGCGACGGCCCCGTGCTGCTGCCCGACAACCACTACCTGAGCACCCAGTCC
GCCCTGAGCAAAGACCCCAACGAGAAGCGCGATCACATGGTCCTGCTGGAGTTCGTGACCGCCG
CCGGGATCACTCTCGGCATGGACGAGCTGTACAAGTAAcctgcaggcgccggcgGAGCAGGAGG
ACCAAGGCCCTGGCGAAGGCCGTGGCCTCGTTCTCCACCTTGACCACGCGTTGTGCAGGTCCCA
ATGGGCGTGTGGTAGAGGTGGAGCACGGGGACGCGGGCCTGGACGCCGGCATCCGGGCTCAGGA
CCCCCCTCGAGCTCGCTGATCAGCCTCGACTGTGCCTTCTAGTTGCCAGCCATCTGTTGTTTGC
CCCTCCCCCGTGCCTTCCTTGACCCTGGAAGGTGCCACTCCCACTGTCCTTTCCTAATAAAATG
AGGAAATTGCATCGCATTGTCTGAGTAGGTGTCATTCTATTCTGGGGGGTGGGGTGGGGCAGGA
CAGCAAGGGGGAGGATTGGGAAGACAATAGCAGGCATGCTGGGGATGCGGTGGGCTCTATGGAA
GCTTGAATTCAGCTGACGTGCCTCGGACCGCTAGGAACCCCTAGTGATGGAGTTGGCCACTCCC
TCTCTGCGCGCTCGCTCGCTCACTGAGGCCGGGCGACCAAAGGTCGCCCGACGCCCGGGCTTTG
CCCGGGCGGCCTCAGTGAGCGAGCGAGCGCGCAG
Exemplary pITR.CAG.miR2i_miR5u-96_EGFP Construct sequence
(SEQ ID NO: 180)
CTGCGCGCTCGCTCGCTCACTGAGGCCGCCCGGGCGTCGGGCGACCTTTGGTCGCCCGGCCTCA
GTGAGCGAGCGAGCGCGCAGAGAGGGAGTGGCCAACTCCATCACTAGGGGTTCCTGCGGCCGCA
CGCGTGACATTGATTATTGACTAGTTATTAATAGTAATCAATTACGGGGTCATTAGTTCATAGC
CCATATATGGAGTTCCGCGTTACATAACTTACGGTAAATGGCCCGCCTGGCTGACCGCCCAACG
ACCCCCGCCCATTGACGTCAATAATGACGTATGTTCCCATAGTAACGCCAATAGGGACTTTCCA
TTGACGTCAATGGGTGGACTATTTACGGTAAACTGCCCACTTGGCAGTACATCAAGTGTATCAT
ATGCCAAGTACGCCCCCTATTGACGTCAATGACGGTAAATGGCCCGCCTGGCATTATGCCCAGT
ACATGACCTTATGGGACTTTCCTACTTGGCAGTACATCTACGTATTAGTCATCGCTATTACCAT
GGGTCGAGGTGAGCCCCACGTTCTGCTTCACTCTCCCCATCTCCCCCCCCTCCCCACCCCCAAT
TTTGTATTTATTTATTTTTTAATTATTTTGTGCAGCGATGGGGGCGGGGGGGGGGGGGGCGCGC
GCCAGGCGGGGCGGGGCGGGGCGAGGGGCGGGGCGGGGCGAGGCGGAGAGGTGCGGCGGCAGCC
AATCAGAGCGGCGCGCTCCGAAAGTTTCCTTTTATGGCGAGGCGGCGGCGGCGGCGGCCCTATA
AAAAGCGAAGCGCGCGGCGGGCGGGAGTCGCTGCGTTGCCTTCGCCCCGTGCCCCGCTCCGCGC
CGCCTCGCGCCGCCCGCCCCGGCTCTGACTGACCGCGTTACTCCCACAGGTGAGCGGGCGGGAC
GGCCCTTCTCCTCCGGGCTGTAATTAGCGCTTGGTTTAATGACGGCTCGTTTCTTTTCTGTGGC
TGCGTGAAAGCCTTAAAGGGCTCCGGGAGGGCCCTTTGTGCGGGGGGGAGCGGCTCGGGGGGTG
CGTGCGTGTGTGTGTGCGTGGGGAGCGCCGCGTGCGGCCCGCGCTGCCCGGCGGCTGTGAGCGC
TGCGGGCGCGGCGCGGGGCTTTGTGCGCTCCGCGTGTGCGCGAGGGGAGCGCGGCCGGGGGCGG
TGCCCCGCGGTGCGGGGGGGCTGCGAGGGGAACAAAGGCTGCGTGCGGGGTGTGTGCGTGGGGG
GGTGAGCAGGGGGTGTGGGCGCGGCGGTCGGGCTGTAACCCCCCCCTGCACCCCCCTCCCCGAG
TTGCTGAGCACGGCCCGGCTTCGGGTGCGGGGCTCCGTGCGGGGCGTGGCGCGGGGCTCGCCGT
GCCGGGCGGGGGGTGGCGGCAGGTGGGGGTGCCGGGCGGGGCGGGGCCGCCTCGGGCCGGGGAG
GGCTCGGGGGAGGGGCGCGGCGGCCCCCGGAGCGCCGGCGGTGTCCCCAGAGAGCCCGCACCAG
TGCCATCTGCTTGGCCGATTTGAGTCTCAGAGATGCCCggCTTGTGTCTCTCCGCTCTGAGCTG
TCTGTCTCGAGGCTCATATGGGAAAAGCAGGACCCGCAGCTGCGTCCGCCTCCCCTGCATTCTA
GAGCCTCTGCTAACCATGTTCATGCCTTCTTCTTTTTCCTACAGCTCCTGGGCAACGTGCTGGT
TATTGTGACCGGTCGCTAGCCACCATGGTGAGCAAGGGCGAGGAGCTGTTCACCGGGGTGGTGC
CCATCCTGGTCGAGCTGGACGGCGACGTAAACGGCCACAAGTTCAGCGTGTCCGGCGAGGGCGA
GGGCGATGCCACCTACGGCAAGCTGACCCTGAAGTTCATCTGCACCACCGGCAAGCTGCCCGTG
CCCTGGCCCACCCTCGTGACCACCCTGACCTACGGCGTGCAGTGCTTCAGCCGCTACCCCGACC
ACATGAAGCAGCACGACTTCTTCAAGTCCGCCATGCCCGAAGGCTACGTCCAGGAGCGCACCAT
qTTCTTCAAGGACGACGGCAACTACAAGACCCGCGCCGAGGTGAAGTTCGAGGGCGACACCCTG
GTGAACCGCATCGAGCTGAAGGGCATCGACTTCAAGGAGGACGGCAACATCCTGGGGCACAAGC
TGGAGTACAACTACAACAGCCACAACGTCTATATCATGGCCGACAAGCAGAAGAACGGCATCAA
GGTGAACTTCAAGATCCGCCACAACATCGAGGACGGCAGCGTGCAGCTCGCCGACCACTACCAG
CAGAACACCCCCATCGGCGACGGCCCCGTGCTGCTGCCCGACAACCACTACCTGAGCACCCAGT
CCGCCCTGAGCAAAGACCCCAACGAGAAGCGCGATCACATGGTCCTGCTGGAGTTCGTGACCGC
CGCCGGGATCACTCTCGGCATGGACGAGCTGTACAAGTAAcctgcaggcgccggcgGTGTCCCC
AGAGAGCCCGCACCAGTGCCATCTGCTTGGCCGATTTCTCCACCTTGACCACGCGTCTTGTGTC
TCTCCGCTCTGAGGTGACTGGTTGGGTGGAGATATGGGAAAAGCAGGACCCGCAGCTGCGTCCG
CCTCCCCTGCATGAGCTCGCTGATCAGCCTCGACTGTGCCTTCTAGTTGCCAGCCATCTGTTGT
TTGCCCCTCCCCCGTGCCTTCCTTGACCCTGGAAGGTGCCACTCCCACTGTCCTTTCCTAATAA
AATGAGGAAATTGCATCGCATTGTCTGAGTAGGTGTCATTCTATTCTGGGGGGTGGGGTGGGGC
AGGACAGCAAGGGGGAGGATTGGGAAGACAATAGCAGGCATGCTGGGGATGCGGTGGGCTCTAT
GGAAGCTTGAATTCAGCTGACGTGCCTCGGACCGCTAGGAACCCCTAGTGATGGAGTTGGCCAC
TCCCTCTCTGCGCGCTCGCTCGCTCACTGAGGCCGGGCGACCAAAGGTCGCCCGACGCCCGGGC
TTTGCCCGGGCGGCCTCAGTGAGCGAGCGAGCGCGCAG
Exemplary pITR.CAG.miR2i_miR6u-16_EGFP Construct sequence
(SEQ ID NO: 181)
CTGCGCGCTCGCTCGCTCACTGAGGCCGCCCGGGCGTCGGGCGACCTTTGGTCGCCCGGCCTCA
GTGAGCGAGCGAGCGCGCAGAGAGGGAGTGGCCAACTCCATCACTAGGGGTTCCTGCGGCCGCA
CGCGTGACATTGATTATTGACTAGTTATTAATAGTAATCAATTACGGGGTCATTAGTTCATAGC
CCATATATGGAGTTCCGCGTTACATAACTTACGGTAAATGGCCCGCCTGGCTGACCGCCCAACG
ACCCCCGCCCATTGACGTCAATAATGACGTATGTTCCCATAGTAACGCCAATAGGGACTTTCCA
TTGACGTCAATGGGTGGACTATTTACGGTAAACTGCCCACTTGGCAGTACATCAAGTGTATCAT
ATGCCAAGTACGCCCCCTATTGACGTCAATGACGGTAAATGGCCCGCCTGGCATTATGCCCAGT
ACATGACCTTATGGGACTTTCCTACTTGGCAGTACATCTACGTATTAGTCATCGCTATTACCAT
GGGTCGAGGTGAGCCCCACGTTCTGCTTCACTCTCCCCATCTCCCCCCCCTCCCCACCCCCAAT
TTTGTATTTATTTATTTTTTAATTATTTTGTGCAGCGATGGGGGCGGGGGGGGGGGGGGCGCGC
GCCAGGCGGGGCGGGGCGGGGCGAGGGGCGGGGCGGGGCGAGGCGGAGAGGTGCGGCGGCAGCC
AATCAGAGCGGCGCGCTCCGAAAGTTTCCTTTTATGGCGAGGCGGCGGCGGCGGCGGCCCTATA
AAAAGCGAAGCGCGCGGCGGGCGGGAGTCGCTGCGTTGCCTTCGCCCCGTGCCCCGCTCCGCGC
CGCCTCGCGCCGCCCGCCCCGGCTCTGACTGACCGCGTTACTCCCACAGGTGAGCGGGCGGGAC
GGCCCTTCTCCTCCGGGCTGTAATTAGCGCTTGGTTTAATGACGGCTCGTTTCTTTTCTGTGGC
TGCGTGAAAGCCTTAAAGGGCTCCGGGAGGGCCCTTTGTGCGGGGGGGAGCGGCTCGGGGGGTG
CGTGCGTGTGTGTGTGCGTGGGGAGCGCCGCGTGCGGCCCGCGCTGCCCGGCGGCTGTGAGCGC
TGCGGGCGCGGCGCGGGGCTTTGTGCGCTCCGCGTGTGCGCGAGGGGAGCGCGGCCGGGGGCGG
TGCCCCGCGGTGCGGGGGGGCTGCGAGGGGAACAAAGGCTGCGTGCGGGGTGTGTGCGTGGGGG
GGTGAGCAGGGGGTGTGGGCGCGGCGGTCGGGCTGTAACCCCCCCCTGCACCCCCCTCCCCGAG
TTGCTGAGCACGGCCCGGCTTCGGGTGCGGGGCTCCGTGCGGGGCGTGGCGCGGGGCTCGCCGT
GCCGGGCGGGGGGTGGCGGCAGGTGGGGGTGCCGGGCGGGGCGGGGCCGCCTCGGGCCGGGGAG
GGCTCGGGGGAGGGGCGCGGCGGCCCCCGGAGCGCCGGCGCATAGCTCTTATGATAGCAATGTC
AGCAGTGCCTTTGAGTCTCAGAGATGCCCGGGTTAAGATTCTAAAATTATCACGGGTATTACTT
GAGGCTCAGAAGTAAGGTTGACCATACTCTACAGTTGTGTCTAGAGCCTCTGCTAACCATGTTC
ATGCCTTCTTCTTTTTCCTACAGCTCCTGGGCAACGTGCTGGTTATTGTGACCGGTCGCTAGCC
ACCATGGTGAGCAAGGGCGAGGAGCTGTTCACCGGGGTGGTGCCCATCCTGGTCGAGCTGGACG
GCGACGTAAACGGCCACAAGTTCAGCGTGTCCGGCGAGGGCGAGGGCGATGCCACCTACGGCAA
GCTGACCCTGAAGTTCATCTGCACCACCGGCAAGCTGCCCGTGCCCTGGCCCACCCTCGTGACC
ACCCTGACCTACGGCGTGCAGTGCTTCAGCCGCTACCCCGACCACATGAAGCAGCACGACTTCT
TCAAGTCCGCCATGCCCGAAGGCTACGTCCAGGAGCGCACCATCTTCTTCAAGGACGACGGCAA
CTACAAGACCCGCGCCGAGGTGAAGTTCGAGGGCGACACCCTGGTGAACCGCATCGAGCTGAAG
GGCATCGACTTCAAGGAGGACGGCAACATCCTGGGGCACAAGCTGGAGTACAACTACAACAGCC
ACAACGTCTATATCATGGCCGACAAGCAGAAGAACGGCATCAAGGTGAACTTCAAGATCCGCCA
CAACATCGAGGACGGCAGCGTGCAGCTCGCCGACCACTACCAGCAGAACACCCCCATCGGCGAC
GGCCCCGTGCTGCTGCCCGACAACCACTACCTGAGCACCCAGTCCGCCCTGAGCAAAGACCCCA
ACGAGAAGCGCGATCACATGGTCCTGCTGGAGTTCGTGACCGCCGCCGGGATCACTCTCGGCAT
GGACGAGCTGTACAAGTAAcctgcaggcgccggcgCATAGCTCTTATGATAGCAATGTCAGCAG
TGCCTATACTGTCATAGTAGTACCAGGTTAAGATTCTAAAATTATCATGGTACTAATGTTGGCA
GTGTAAGTAAGGTTGACCATACTCTACAGTTGTGGAGCTCGCTGATCAGCCTCGACTGTGCCTT
CTAGTTGCCAGCCATCTGTTGTTTGCCCCTCCCCCGTGCCTTCCTTGACCCTGGAAGGTGCCAC
TCCCACTGTCCTTTCCTAATAAAATGAGGAAATTGCATCGCATTGTCTGAGTAGGTGTCATTCT
ATTCTGGGGGGTGGGGTGGGGCAGGACAGCAAGGGGGAGGATTGGGAAGACAATAGCAGGCATG
CTGGGGATGCGGTGGGCTCTATGGAAGCTTGAATTCAGCTGACGTGCCTCGGACCGCTAGGAAC
CCCTAGTGATGGAGTTGGCCACTCCCTCTCTGCGCGCTCGCTCGCTCACTGAGGCCGGGCGACC
AAAGGTCGCCCGACGCCCGGGCTTTGCCCGGGCGGCCTCAGTGAGCGAGCGAGCGCGCAG
Exemplary pITR.CAG.miR2i_miR6u-26_EGFP Construct sequence
(SEQ ID NO: 182)
CTGCGCGCTCGCTCGCTCACTGAGGCCGCCCGGGCGTCGGGCGACCTTTGGTCGCCCGGCCTCA
GTGAGCGAGCGAGCGCGCAGAGAGGGAGTGGCCAACTCCATCACTAGGGGTTCCTGCGGCCGCA
CGCGTGACATTGATTATTGACTAGTTATTAATAGTAATCAATTACGGGGTCATTAGTTCATAGC
CCATATATGGAGTTCCGCGTTACATAACTTACGGTAAATGGCCCGCCTGGCTGACCGCCCAACG
ACCCCCGCCCATTGACGTCAATAATGACGTATGTTCCCATAGTAACGCCAATAGGGACTTTCCA
TTGACGTCAATGGGTGGACTATTTACGGTAAACTGCCCACTTGGCAGTACATCAAGTGTATCAT
ATGCCAAGTACGCCCCCTATTGACGTCAATGACGGTAAATGGCCCGCCTGGCATTATGCCCAGT
ACATGACCTTATGGGACTTTCCTACTTGGCAGTACATCTACGTATTAGTCATCGCTATTACCAT
GGGTCGAGGTGAGCCCCACGTTCTGCTTCACTCTCCCCATCTCCCCCCCCTCCCCACCCCCAAT
TTTGTATTTATTTATTTTTTAATTATTTTGTGCAGCGATGGGGGCGGGGGGGGGGGGGGCGCGC
GCCAGGCGGGGCGGGGCGGGGCGAGGGGCGGGGCGGGGCGAGGCGGAGAGGTGCGGCGGCAGCC
AATCAGAGCGGCGCGCTCCGAAAGTTTCCTTTTATGGCGAGGCGGCGGCGGCGGCGGCCCTATA
AAAAGCGAAGCGCGCGGCGGGCGGGAGTCGCTGCGTTGCCTTCGCCCCGTGCCCCGCTCCGCGC
CGCCTCGCGCCGCCCGCCCCGGCTCTGACTGACCGCGTTACTCCCACAGGTGAGCGGGCGGGAC
GGCCCTTCTCCTCCGGGCTGTAATTAGCGCTTGGTTTAATGACGGCTCGTTTCTTTTCTGTGGC
TGCGTGAAAGCCTTAAAGGGCTCCGGGAGGGCCCTTTGTGCGGGGGGGAGCGGCTCGGGGGGTG
CGTGCGTGTGTGTGTGCGTGGGGAGCGCCGCGTGCGGCCCGCGCTGCCCGGCGGCTGTGAGCGC
TGCGGGCGCGGCGCGGGGCTTTGTGCGCTCCGCGTGTGCGCGAGGGGAGCGCGGCCGGGGGCGG
TGCCCCGCGGTGCGGGGGGGCTGCGAGGGGAACAAAGGCTGCGTGCGGGGTGTGTGCGTGGGGG
GGTGAGCAGGGGGTGTGGGCGCGGCGGTCGGGCTGTAACCCCCCCCTGCACCCCCCTCCCCGAG
TTGCTGAGCACGGCCCGGCTTCGGGTGCGGGGCTCCGTGCGGGGCGTGGCGCGGGGCTCGCCGT
GCCGGGCGGGGGGTGGCGGCAGGTGGGGGTGCCGGGCGGGGCGGGGCCGCCTCGGGCCGGGGAG
GGCTCGGGGGAGGGGCGCGGCGGCCCCCGGAGCGCCGGCGGAGCAGGAGGACCAAGGCCCTGGC
GAAGGCCGTGGCCTCGTTGAGTCTCAGAGATGCCCGGTGTGCAGGTCCCAATGGCCGGGTATTA
CTGAGATTCCACGGGGACGCGGGCCTGGACGCCGGCATCCGGGCTCAGGACCCCCCTCTCTAGA
GCCTCTGCTAACCATGTTCATGCCTTCTTCTTTTTCCTACAGCTCCTGGGCAACGTGCTGGTTA
TTGTGACCGGTCGCTAGCCACCATGGTGAGCAAGGGCGAGGAGCTGTTCACCGGGGTGGTGCCC
ATCCTGGTCGAGCTGGACGGCGACGTAAACGGCCACAAGTTCAGCGTGTCCGGCGAGGGCGAGG
GCGATGCCACCTACGGCAAGCTGACCCTGAAGTTCATCTGCACCACCGGCAAGCTGCCCGTGCC
CTGGCCCACCCTCGTGACCACCCTGACCTACGGCGTGCAGTGCTTCAGCCGCTACCCCGACCAC
ATGAAGCAGCACGACTTCTTCAAGTCCGCCATGCCCGAAGGCTACGTCCAGGAGCGCACCATCT
TCTTCAAGGACGACGGCAACTACAAGACCCGCGCCGAGGTGAAGTTCGAGGGCGACACCCTGGT
GAACCGCATCGAGCTGAAGGGCATCGACTTCAAGGAGGACGGCAACATCCTGGGGCACAAGCTG
GAGTACAACTACAACAGCCACAACGTCTATATCATGGCCGACAAGCAGAAGAACGGCATCAAGG
TGAACTTCAAGATCCGCCACAACATCGAGGACGGCAGCGTGCAGCTCGCCGACCACTACCAGCA
GAACACCCCCATCGGCGACGGCCCCGTGCTGCTGCCCGACAACCACTACCTGAGCACCCAGTCC
GCCCTGAGCAAAGACCCCAACGAGAAGCGCGATCACATGGTCCTGCTGGAGTTCGTGACCGCCG
CCGGGATCACTCTCGGCATGGACGAGCTGTACAAGTAAcctgcaggcgccggcgGAGCAGGAGG
ACCAAGGCCCTGGCGAAGGCCGTGGCCTCGATACTGTCATAGTAGTACCAGTGTGCAGGTCCCA
ATGGCTGGTACTAATGTGACAGTCTCGGGGACGCGGGCCTGGACGCCGGCATCCGGGCTCAGGA
CCCCCCTCGAGCTCGCTGATCAGCCTCGACTGTGCCTTCTAGTTGCCAGCCATCTGTTGTTTGC
CCCTCCCCCGTGCCTTCCTTGACCCTGGAAGGTGCCACTCCCACTGTCCTTTCCTAATAAAATG
AGGAAATTGCATCGCATTGTCTGAGTAGGTGTCATTCTATTCTGGGGGGTGGGGTGGGGCAGGA
CAGCAAGGGGGAGGATTGGGAAGACAATAGCAGGCATGCTGGGGATGCGGTGGGCTCTATGGAA
GCTTGAATTCAGCTGACGTGCCTCGGACCGCTAGGAACCCCTAGTGATGGAGTTGGCCACTCCC
TCTCTGCGCGCTCGCTCGCTCACTGAGGCCGGGCGACCAAAGGTCGCCCGACGCCCGGGCTTTG
CCCGGGCGGCCTCAGTGAGCGAGCGAGCGCGCAG
Exemplary pITR.CAG.miR2i_miR6u-96_EGFP Construct sequence
(SEQ ID NO: 183)
CTGCGCGCTCGCTCGCTCACTGAGGCCGCCCGGGCGTCGGGCGACCTTTGGTCGCCCGGCCTCA
GTGAGCGAGCGAGCGCGCAGAGAGGGAGTGGCCAACTCCATCACTAGGGGTTCCTGCGGCCGCA
CGCGTGACATTGATTATTGACTAGTTATTAATAGTAATCAATTACGGGGTCATTAGTTCATAGC
CCATATATGGAGTTCCGCGTTACATAACTTACGGTAAATGGCCCGCCTGGCTGACCGCCCAACG
ACCCCCGCCCATTGACGTCAATAATGACGTATGTTCCCATAGTAACGCCAATAGGGACTTTCCA
TTGACGTCAATGGGTGGACTATTTACGGTAAACTGCCCACTTGGCAGTACATCAAGTGTATCAT
ATGCCAAGTACGCCCCCTATTGACGTCAATGACGGTAAATGGCCCGCCTGGCATTATGCCCAGT
ACATGACCTTATGGGACTTTCCTACTTGGCAGTACATCTACGTATTAGTCATCGCTATTACCAT
GGGTCGAGGTGAGCCCCACGTTCTGCTTCACTCTCCCCATCTCCCCCCCCTCCCCACCCCCAAT
TTTGTATTTATTTATTTTTTAATTATTTTGTGCAGCGATGGGGGCGGGGGGGGGGGGGGCGCGC
GCCAGGCGGGGCGGGGCGGGGCGAGGGGCGGGGCGGGGCGAGGCGGAGAGGTGCGGCGGCAGCC
AATCAGAGCGGCGCGCTCCGAAAGTTTCCTTTTATGGCGAGGCGGCGGCGGCGGCGGCCCTATA
AAAAGCGAAGCGCGCGGCGGGCGGGAGTCGCTGCGTTGCCTTCGCCCCGTGCCCCGCTCCGCGC
CGCCTCGCGCCGCCCGCCCCGGCTCTGACTGACCGCGTTACTCCCACAGGTGAGCGGGCGGGAC
GGCCCTTCTCCTCCGGGCTGTAATTAGCGCTTGGTTTAATGACGGCTCGTTTCTTTTCTGTGGC
TGCGTGAAAGCCTTAAAGGGCTCCGGGAGGGCCCTTTGTGCGGGGGGGAGCGGCTCGGGGGGTG
CGTGCGTGTGTGTGTGCGTGGGGAGCGCCGCGTGCGGCCCGCGCTGCCCGGCGGCTGTGAGCGC
TGCGGGCGCGGCGCGGGGCTTTGTGCGCTCCGCGTGTGCGCGAGGGGAGCGCGGCCGGGGGCGG
TGCCCCGCGGTGCGGGGGGGCTGCGAGGGGAACAAAGGCTGCGTGCGGGGTGTGTGCGTGGGGG
GGTGAGCAGGGGGTGTGGGCGCGGCGGTCGGGCTGTAACCCCCCCCTGCACCCCCCTCCCCGAG
TTGCTGAGCACGGCCCGGCTTCGGGTGCGGGGCTCCGTGCGGGGCGTGGCGCGGGGCTCGCCGT
GCCGGGCGGGGGGTGGCGGCAGGTGGGGGTGCCGGGCGGGGCGGGGCCGCCTCGGGCCGGGGAG
GGCTCGGGGGAGGGGCGCGGCGGCCCCCGGAGCGCCGGCGGTGTCCCCAGAGAGCCCGCACCAG
TGCCATCTGCTTGGCCGATTTGAGTCTCAGAGATGCCCggCTTGTGTCTCTCCGCTCTGAGCTG
TCTGTCTCGAGGCTCATATGGGAAAAGCAGGACCCGCAGCTGCGTCCGCCTCCCCTGCATTCTA
GAGCCTCTGCTAACCATGTTCATGCCTTCTTCTTTTTCCTACAGCTCCTGGGCAACGTGCTGGT
TATTGTGACCGGTCGCTAGCCACCATGGTGAGCAAGGGCGAGGAGCTGTTCACCGGGGTGGTGC
CCATCCTGGTCGAGCTGGACGGCGACGTAAACGGCCACAAGTTCAGCGTGTCCGGCGAGGGCGA
GGGCGATGCCACCTACGGCAAGCTGACCCTGAAGTTCATCTGCACCACCGGCAAGCTGCCCGTG
CCCTGGCCCACCCTCGTGACCACCCTGACCTACGGCGTGCAGTGCTTCAGCCGCTACCCCGACC
ACATGAAGCAGCACGACTTCTTCAAGTCCGCCATGCCCGAAGGCTACGTCCAGGAGCGCACCAT
CTTCTTCAAGGACGACGGCAACTACAAGACCCGCGCCGAGGTGAAGTTCGAGGGCGACACCCTG
GTGAACCGCATCGAGCTGAAGGGCATCGACTTCAAGGAGGACGGCAACATCCTGGGGCACAAGC
TGGAGTACAACTACAACAGCCACAACGTCTATATCATGGCCGACAAGCAGAAGAACGGCATCAA
GGTGAACTTCAAGATCCGCCACAACATCGAGGACGGCAGCGTGCAGCTCGCCGACCACTACCAG
CAGAACACCCCCATCGGCGACGGCCCCGTGCTGCTGCCCGACAACCACTACCTGAGCACCCAGT
CCGCCCTGAGCAAAGACCCCAACGAGAAGCGCGATCACATGGTCCTGCTGGAGTTCGTGACCGC
CGCCGGGATCACTCTCGGCATGGACGAGCTGTACAAGTAAcctgcaggcgccggcgGTGTCCCC
AGAGAGCCCGCACCAGTGCCATCTGCTTGGCCGATATACTGTCATAGTAGTACCAGCTTGTGTC
TCTCCGCTCTGAGCTGTCACTGCTTGACGGTAAATGGGAAAAGCAGGACCCGCAGCTGCGTCCG
CCTCCCCTGCATGAGCTCGCTGATCAGCCTCGACTGTGCCTTCTAGTTGCCAGCCATCTGTTGT
TTGCCCCTCCCCCGTGCCTTCCTTGACCCTGGAAGGTGCCACTCCCACTGTCCTTTCCTAATAA
AATGAGGAAATTGCATCGCATTGTCTGAGTAGGTGTCATTCTATTCTGGGGGGTGGGGTGGGGC
AGGACAGCAAGGGGGAGGATTGGGAAGACAATAGCAGGCATGCTGGGGATGCGGTGGGCTCTAT
GGAAGCTTGAATTCAGCTGACGTGCCTCGGACCGCTAGGAACCCCTAGTGATGGAGTTGGCCAC
TCCCTCTCTGCGCGCTCGCTCGCTCACTGAGGCCGGGCGACCAAAGGTCGCCCGACGCCCGGGC
TTTGCCCGGGCGGCCTCAGTGAGCGAGCGAGCGCGCAG
Exemplary pITR.CAG.miR4-16_EGFP Construct sequence
(SEQ ID NO: 184)
CTGCGCGCTCGCTCGCTCACTGAGGCCGCCCGGGCGTCGGGCGACCTTTGGTCGCCCGGCCTCA
GTGAGCGAGCGAGCGCGCAGAGAGGGAGTGGCCAACTCCATCACTAGGGGTTCCTGCGGCCGCA
CGCGTGACATTGATTATTGACTAGTTATTAATAGTAATCAATTACGGGGTCATTAGTTCATAGC
CCATATATGGAGTTCCGCGTTACATAACTTACGGTAAATGGCCCGCCTGGCTGACCGCCCAACG
ACCCCCGCCCATTGACGTCAATAATGACGTATGTTCCCATAGTAACGCCAATAGGGACTTTCCA
TTGACGTCAATGGGTGGACTATTTACGGTAAACTGCCCACTTGGCAGTACATCAAGTGTATCAT
ATGCCAAGTACGCCCCCTATTGACGTCAATGACGGTAAATGGCCCGCCTGGCATTATGCCCAGT
ACATGACCTTATGGGACTTTCCTACTTGGCAGTACATCTACGTATTAGTCATCGCTATTACCAT
GGGTCGAGGTGAGCCCCACGTTCTGCTTCACTCTCCCCATCTCCCCCCCCTCCCCACCCCCAAT
TTTGTATTTATTTATTTTTTAATTATTTTGTGCAGCGATGGGGGCGGGGGGGGGGGGGGCGCGC
GCCAGGCGGGGCGGGGCGGGGCGAGGGGCGGGGCGGGGCGAGGCGGAGAGGTGCGGCGGCAGCC
AATCAGAGCGGCGCGCTCCGAAAGTTTCCTTTTATGGCGAGGCGGCGGCGGCGGCGGCCCTATA
AAAAGCGAAGCGCGCGGCGGGCGGGAGTCGCTGCGTTGCCTTCGCCCCGTGCCCCGCTCCGCGC
CGCCTCGCGCCGCCCGCCCCGGCTCTGACTGACCGCGTTACTCCCACAGGTGAGCGGGCGGGAC
GGCCCTTCTCCTCCGGGCTGTAATTAGCGCTTGGTTTAATGACGGCTCGTTTCTTTTCTGTGGC
TGCGTGAAAGCCTTAAAGGGCTCCGGGAGGGCCCTTTGTGCGGGGGGGAGCGGCTCGGGGGGTG
CGTGCGTGTGTGTGTGCGTGGGGAGCGCCGCGTGCGGCCCGCGCTGCCCGGCGGCTGTGAGCGC
TGCGGGCGCGGCGCGGGGCTTTGTGCGCTCCGCGTGTGCGCGAGGGGAGCGCGGCCGGGGGCGG
TGCCCCGCGGTGCGGGGGGGCTGCGAGGGGAACAAAGGCTGCGTGCGGGGTGTGTGCGTGGGGG
GGTGAGCAGGGGGTGTGGGCGCGGCGGTCGGGCTGTAACCCCCCCCTGCACCCCCCTCCCCGAG
TTGCTGAGCACGGCCCGGCTTCGGGTGCGGGGCTCCGTGCGGGGCGTGGCGCGGGGCTCGCCGT
GCCGGGCGGGGGGTGGCGGCAGGTGGGGGTGCCGGGCGGGGCGGGGCCGCCTCGGGCCGGGGAG
GGCTCGGGGGAGGGGCGCGGCGGCCCCCGGAGCGCCGGCGCATAGCTCTTATGATAGCAATGTC
AGCAGTGCCTTTCTCGAAGTGCTTCTGCCGGGTTAAGATTCTAAAATTATCACGGTAGAAACAT
CTTCGGGAGAAGTAAGGTTGACCATACTCTACAGTTGTGTCTAGAGCCTCTGCTAACCATGTTC
ATGCCTTCTTCTTTTTCCTACAGCTCCTGGGCAACGTGCTGGTTATTGTGACCGGTCGCTAGCC
ACCATGGTGAGCAAGGGCGAGGAGCTGTTCACCGGGGTGGTGCCCATCCTGGTCGAGCTGGACG
GCGACGTAAACGGCCACAAGTTCAGCGTGTCCGGCGAGGGCGAGGGCGATGCCACCTACGGCAA
GCTGACCCTGAAGTTCATCTGCACCACCGGCAAGCTGCCCGTGCCCTGGCCCACCCTCGTGACC
ACCCTGACCTACGGCGTGCAGTGCTTCAGCCGCTACCCCGACCACATGAAGCAGCACGACTTCT
TCAAGTCCGCCATGCCCGAAGGCTACGTCCAGGAGCGCACCATCTTCTTCAAGGACGACGGCAA
CTACAAGACCCGCGCCGAGGTGAAGTTCGAGGGCGACACCCTGGTGAACCGCATCGAGCTGAAG
GGCATCGACTTCAAGGAGGACGGCAACATCCTGGGGCACAAGCTGGAGTACAACTACAACAGCC
ACAACGTCTATATCATGGCCGACAAGCAGAAGAACGGCATCAAGGTGAACTTCAAGATCCGCCA
CAACATCGAGGACGGCAGCGTGCAGCTCGCCGACCACTACCAGCAGAACACCCCCATCGGCGAC
GGCCCCGTGCTGCTGCCCGACAACCACTACCTGAGCACCCAGTCCGCCCTGAGCAAAGACCCCA
ACGAGAAGCGCGATCACATGGTCCTGCTGGAGTTCGTGACCGCCGCCGGGATCACTCTCGGCAT
GGACGAGCTGTACAAGTAAcctgcaggcgccggcgCATAGCTCTTATGATAGCAATGTCAGCAG
TGCCTTTCTCGAAGTGCTTCTGCCGGGTTAAGATTCTAAAATTATCACGGTAGAAACATCTTCG
GGAGAAGTAAGGTTGACCATACTCTACAGTTGTGGAGCTCGCTGATCAGCCTCGACTGTGCCTT
CTAGTTGCCAGCCATCTGTTGTTTGCCCCTCCCCCGTGCCTTCCTTGACCCTGGAAGGTGCCAC
TCCCACTGTCCTTTCCTAATAAAATGAGGAAATTGCATCGCATTGTCTGAGTAGGTGTCATTCT
ATTCTGGGGGGTGGGGTGGGGCAGGACAGCAAGGGGGAGGATTGGGAAGACAATAGCAGGCATG
CTGGGGATGCGGTGGGCTCTATGGAAGCTTGAATTCAGCTGACGTGCCTCGGACCGCTAGGAAC
CCCTAGTGATGGAGTTGGCCACTCCCTCTCTGCGCGCTCGCTCGCTCACTGAGGCCGGGCGACC
AAAGGTCGCCCGACGCCCGGGCTTTGCCCGGGCGGCCTCAGTGAGCGAGCGAGCGCGCAG
Exemplary pITR.CAG.miR4-26_EGFP Construct sequence
(SEQ ID NO: 185)
CTGCGCGCTCGCTCGCTCACTGAGGCCGCCCGGGCGTCGGGCGACCTTTGGTCGCCCGGCCTCA
GTGAGCGAGCGAGCGCGCAGAGAGGGAGTGGCCAACTCCATCACTAGGGGTTCCTGCGGCCGCA
CGCGTGACATTGATTATTGACTAGTTATTAATAGTAATCAATTACGGGGTCATTAGTTCATAGC
CCATATATGGAGTTCCGCGTTACATAACTTACGGTAAATGGCCCGCCTGGCTGACCGCCCAACG
ACCCCCGCCCATTGACGTCAATAATGACGTATGTTCCCATAGTAACGCCAATAGGGACTTTCCA
TTGACGTCAATGGGTGGACTATTTACGGTAAACTGCCCACTTGGCAGTACATCAAGTGTATCAT
ATGCCAAGTACGCCCCCTATTGACGTCAATGACGGTAAATGGCCCGCCTGGCATTATGCCCAGT
ACATGACCTTATGGGACTTTCCTACTTGGCAGTACATCTACGTATTAGTCATCGCTATTACCAT
GGGTCGAGGTGAGCCCCACGTTCTGCTTCACTCTCCCCATCTCCCCCCCCTCCCCACCCCCAAT
TTTGTATTTATTTATTTTTTAATTATTTTGTGCAGCGATGGGGGCGGGGGGGGGGGGGGCGCGC
GCCAGGCGGGGCGGGGCGGGGCGAGGGGCGGGGCGGGGCGAGGCGGAGAGGTGCGGCGGCAGCC
AATCAGAGCGGCGCGCTCCGAAAGTTTCCTTTTATGGCGAGGCGGCGGCGGCGGCGGCCCTATA
AAAAGCGAAGCGCGCGGCGGGCGGGAGTCGCTGCGTTGCCTTCGCCCCGTGCCCCGCTCCGCGC
CGCCTCGCGCCGCCCGCCCCGGCTCTGACTGACCGCGTTACTCCCACAGGTGAGCGGGCGGGAC
GGCCCTTCTCCTCCGGGCTGTAATTAGCGCTTGGTTTAATGACGGCTCGTTTCTTTTCTGTGGC
TGCGTGAAAGCCTTAAAGGGCTCCGGGAGGGCCCTTTGTGCGGGGGGGAGCGGCTCGGGGGGTG
CGTGCGTGTGTGTGTGCGTGGGGAGCGCCGCGTGCGGCCCGCGCTGCCCGGCGGCTGTGAGCGC
TGCGGGCGCGGCGCGGGGCTTTGTGCGCTCCGCGTGTGCGCGAGGGGAGCGCGGCCGGGGGCGG
TGCCCCGCGGTGCGGGGGGGCTGCGAGGGGAACAAAGGCTGCGTGCGGGGTGTGTGCGTGGGGG
GGTGAGCAGGGGGTGTGGGCGCGGCGGTCGGGCTGTAACCCCCCCCTGCACCCCCCTCCCCGAG
TTGCTGAGCACGGCCCGGCTTCGGGTGCGGGGCTCCGTGCGGGGCGTGGCGCGGGGCTCGCCGT
GCCGGGCGGGGGGTGGCGGCAGGTGGGGGTGCCGGGCGGGGCGGGGCCGCCTCGGGCCGGGGAG
GGCTCGGGGGAGGGGCGCGGCGGCCCCCGGAGCGCCGGCGGAGCAGGAGGACCAAGGCCCTGGC
GAAGGCCGTGGCCTCGTTCTCGAAGTGCTTCTGCCGGTGTGCAGGTCCCAATGGCCGGTAGAAT
CGTTTCGAGCACGGGGACGCGGGCCTGGACGCCGGCATCCGGGCTCAGGACCCCCCTCTCTAGA
GCCTCTGCTAACCATGTTCATGCCTTCTTCTTTTTCCTACAGCTCCTGGGCAACGTGCTGGTTA
TTGTGACCGGTCGCTAGCCACCATGGTGAGCAAGGGCGAGGAGCTGTTCACCGGGGTGGTGCCC
ATCCTGGTCGAGCTGGACGGCGACGTAAACGGCCACAAGTTCAGCGTGTCCGGCGAGGGCGAGG
GCGATGCCACCTACGGCAAGCTGACCCTGAAGTTCATCTGCACCACCGGCAAGCTGCCCGTGCC
CTGGCCCACCCTCGTGACCACCCTGACCTACGGCGTGCAGTGCTTCAGCCGCTACCCCGACCAC
ATGAAGCAGCACGACTTCTTCAAGTCCGCCATGCCCGAAGGCTACGTCCAGGAGCGCACCATCT
TCTTCAAGGACGACGGCAACTACAAGACCCGCGCCGAGGTGAAGTTCGAGGGCGACACCCTGGT
GAACCGCATCGAGCTGAAGGGCATCGACTTCAAGGAGGACGGCAACATCCTGGGGCACAAGCTG
GAGTACAACTACAACAGCCACAACGTCTATATCATGGCCGACAAGCAGAAGAACGGCATCAAGG
TGAACTTCAAGATCCGCCACAACATCGAGGACGGCAGCGTGCAGCTCGCCGACCACTACCAGCA
GAACACCCCCATCGGCGACGGCCCCGTGCTGCTGCCCGACAACCACTACCTGAGCACCCAGTCC
GCCCTGAGCAAAGACCCCAACGAGAAGCGCGATCACATGGTCCTGCTGGAGTTCGTGACCGCCG
CCGGGATCACTCTCGGCATGGACGAGCTGTACAAGTAAcctgcaggcgccggcgGAGCAGGAGG
ACCAAGGCCCTGGCGAAGGCCGTGGCCTCGTTCTCGAAGTGCTTCTGCCGGTGTGCAGGTCCCA
ATGGCCGGTAGAATCGTTTCGAGCACGGGGACGCGGGCCTGGACGCCGGCATCCGGGCTCAGGA
CCCCCCTCGAGCTCGCTGATCAGCCTCGACTGTGCCTTCTAGTTGCCAGCCATCTGTTGTTTGC
CCCTCCCCCGTGCCTTCCTTGACCCTGGAAGGTGCCACTCCCACTGTCCTTTCCTAATAAAATG
AGGAAATTGCATCGCATTGTCTGAGTAGGTGTCATTCTATTCTGGGGGGTGGGGTGGGGCAGGA
CAGCAAGGGGGAGGATTGGGAAGACAATAGCAGGCATGCTGGGGATGCGGTGGGCTCTATGGAA
GCTTGAATTCAGCTGACGTGCCTCGGACCGCTAGGAACCCCTAGTGATGGAGTTGGCCACTCCC
TCTCTGCGCGCTCGCTCGCTCACTGAGGCCGGGCGACCAAAGGTCGCCCGACGCCCGGGCTTTG
CCCGGGCGGCCTCAGTGAGCGAGCGAGCGCGCAG
Exemplary pITR.CAG.miR4-96_EGFP Construct sequence
(SEQ ID NO: 186)
CTGCGCGCTCGCTCGCTCACTGAGGCCGCCCGGGCGTCGGGCGACCTTTGGTCGCCCGGCCTCA
GTGAGCGAGCGAGCGCGCAGAGAGGGAGTGGCCAACTCCATCACTAGGGGTTCCTGCGGCCGCA
CGCGTGACATTGATTATTGACTAGTTATTAATAGTAATCAATTACGGGGTCATTAGTTCATAGC
CCATATATGGAGTTCCGCGTTACATAACTTACGGTAAATGGCCCGCCTGGCTGACCGCCCAACG
ACCCCCGCCCATTGACGTCAATAATGACGTATGTTCCCATAGTAACGCCAATAGGGACTTTCCA
TTGACGTCAATGGGTGGACTATTTACGGTAAACTGCCCACTTGGCAGTACATCAAGTGTATCAT
ATGCCAAGTACGCCCCCTATTGACGTCAATGACGGTAAATGGCCCGCCTGGCATTATGCCCAGT
ACATGACCTTATGGGACTTTCCTACTTGGCAGTACATCTACGTATTAGTCATCGCTATTACCAT
GGGTCGAGGTGAGCCCCACGTTCTGCTTCACTCTCCCCATCTCCCCCCCCTCCCCACCCCCAAT
TTTGTATTTATTTATTTTTTAATTATTTTGTGCAGCGATGGGGGCGGGGGGGGGGGGGGCGCGC
GCCAGGCGGGGCGGGGCGGGGCGAGGGGCGGGGCGGGGCGAGGCGGAGAGGTGCGGCGGCAGCC
AATCAGAGCGGCGCGCTCCGAAAGTTTCCTTTTATGGCGAGGCGGCGGCGGCGGCGGCCCTATA
AAAAGCGAAGCGCGCGGCGGGCGGGAGTCGCTGCGTTGCCTTCGCCCCGTGCCCCGCTCCGCGC
CGCCTCGCGCCGCCCGCCCCGGCTCTGACTGACCGCGTTACTCCCACAGGTGAGCGGGCGGGAC
GGCCCTTCTCCTCCGGGCTGTAATTAGCGCTTGGTTTAATGACGGCTCGTTTCTTTTCTGTGGC
TGCGTGAAAGCCTTAAAGGGCTCCGGGAGGGCCCTTTGTGCGGGGGGGAGCGGCTCGGGGGGTG
CGTGCGTGTGTGTGTGCGTGGGGAGCGCCGCGTGCGGCCCGCGCTGCCCGGCGGCTGTGAGCGC
TGCGGGCGCGGCGCGGGGCTTTGTGCGCTCCGCGTGTGCGCGAGGGGAGCGCGGCCGGGGGCGG
TGCCCCGCGGTGCGGGGGGGCTGCGAGGGGAACAAAGGCTGCGTGCGGGGTGTGTGCGTGGGGG
GGTGAGCAGGGGGTGTGGGCGCGGCGGTCGGGCTGTAACCCCCCCCTGCACCCCCCTCCCCGAG
TTGCTGAGCACGGCCCGGCTTCGGGTGCGGGGCTCCGTGCGGGGCGTGGCGCGGGGCTCGCCGT
GCCGGGCGGGGGGTGGCGGCAGGTGGGGGTGCCGGGCGGGGCGGGGCCGCCTCGGGCCGGGGAG
GGCTCGGGGGAGGGGCGCGGCGGCCCCCGGAGCGCCGGCGGTGTCCCCAGAGAGCCCGCACCAG
TGCCATCTGCTTGGCCGATTTCTCGAAGTGCTTCTGCCGGCTTGTGTCTCTCCGCTCTGAGCTG
TGAGGAGCTTTCGGGATATGGGAAAAGCAGGACCCGCAGCTGCGTCCGCCTCCCCTGCATTCTA
GAGCCTCTGCTAACCATGTTCATGCCTTCTTCTTTTTCCTACAGCTCCTGGGCAACGTGCTGGT
TATTGTGACCGGTCGCTAGCCACCATGGTGAGCAAGGGCGAGGAGCTGTTCACCGGGGTGGTGC
CCATCCTGGTCGAGCTGGACGGCGACGTAAACGGCCACAAGTTCAGCGTGTCCGGCGAGGGCGA
GGGCGATGCCACCTACGGCAAGCTGACCCTGAAGTTCATCTGCACCACCGGCAAGCTGCCCGTG
CCCTGGCCCACCCTCGTGACCACCCTGACCTACGGCGTGCAGTGCTTCAGCCGCTACCCCGACC
ACATGAAGCAGCACGACTTCTTCAAGTCCGCCATGCCCGAAGGCTACGTCCAGGAGCGCACCAT
CTTCTTCAAGGACGACGGCAACTACAAGACCCGCGCCGAGGTGAAGTTCGAGGGCGACACCCTG
GTGAACCGCATCGAGCTGAAGGGCATCGACTTCAAGGAGGACGGCAACATCCTGGGGCACAAGC
TGGAGTACAACTACAACAGCCACAACGTCTATATCATGGCCGACAAGCAGAAGAACGGCATCAA
GGTGAACTTCAAGATCCGCCACAACATCGAGGACGGCAGCGTGCAGCTCGCCGACCACTACCAG
CAGAACACCCCCATCGGCGACGGCCCCGTGCTGCTGCCCGACAACCACTACCTGAGCACCCAGT
CCGCCCTGAGCAAAGACCCCAACGAGAAGCGCGATCACATGGTCCTGCTGGAGTTCGTGACCGC
CGCCGGGATCACTCTCGGCATGGACGAGCTGTACAAGTAAcctgcaggcgccggcgGTGTCCCC
AGAGAGCCCGCACCAGTGCCATCTGCTTGGCCGATTTCTCGAAGTGCTTCTGCCGGCTTGTGTC
TCTCCGCTCTGAGCTGTGAGGAGCTTTCGGGATATGGGAAAAGCAGGACCCGCAGCTGCGTCCG
CCTCCCCTGCATGAGCTCGCTGATCAGCCTCGACTGTGCCTTCTAGTTGCCAGCCATCTGTTGT
TTGCCCCTCCCCCGTGCCTTCCTTGACCCTGGAAGGTGCCACTCCCACTGTCCTTTCCTAATAA
AATGAGGAAATTGCATCGCATTGTCTGAGTAGGTGTCATTCTATTCTGGGGGGTGGGGTGGGGC
AGGACAGCAAGGGGGAGGATTGGGAAGACAATAGCAGGCATGCTGGGGATGCGGTGGGCTCTAT
GGAAGCTTGAATTCAGCTGACGTGCCTCGGACCGCTAGGAACCCCTAGTGATGGAGTTGGCCAC
TCCCTCTCTGCGCGCTCGCTCGCTCACTGAGGCCGGGCGACCAAAGGTCGCCCGACGCCCGGGC
TTTGCCCGGGCGGCCTCAGTGAGCGAGCGAGCGCGCAG
Exemplary pITR.CAG.miR4i_miR5u-16_EGFP Construct sequence
(SEQ ID NO: 187)
CTGCGCGCTCGCTCGCTCACTGAGGCCGCCCGGGCGTCGGGCGACCTTTGGTCGCCCGGCCTCA
GTGAGCGAGCGAGCGCGCAGAGAGGGAGTGGCCAACTCCATCACTAGGGGTTCCTGCGGCCGCA
CGCGTGACATTGATTATTGACTAGTTATTAATAGTAATCAATTACGGGGTCATTAGTTCATAGC
CCATATATGGAGTTCCGCGTTACATAACTTACGGTAAATGGCCCGCCTGGCTGACCGCCCAACG
ACCCCCGCCCATTGACGTCAATAATGACGTATGTTCCCATAGTAACGCCAATAGGGACTTTCCA
TTGACGTCAATGGGTGGACTATTTACGGTAAACTGCCCACTTGGCAGTACATCAAGTGTATCAT
ATGCCAAGTACGCCCCCTATTGACGTCAATGACGGTAAATGGCCCGCCTGGCATTATGCCCAGT
ACATGACCTTATGGGACTTTCCTACTTGGCAGTACATCTACGTATTAGTCATCGCTATTACCAT
GGGTCGAGGTGAGCCCCACGTTCTGCTTCACTCTCCCCATCTCCCCCCCCTCCCCACCCCCAAT
TTTGTATTTATTTATTTTTTAATTATTTTGTGCAGCGATGGGGGCGGGGGGGGGGGGGGCGCGC
GCCAGGCGGGGCGGGGCGGGGCGAGGGGCGGGGCGGGGCGAGGCGGAGAGGTGCGGCGGCAGCC
AATCAGAGCGGCGCGCTCCGAAAGTTTCCTTTTATGGCGAGGCGGCGGCGGCGGCGGCCCTATA
AAAAGCGAAGCGCGCGGCGGGCGGGAGTCGCTGCGTTGCCTTCGCCCCGTGCCCCGCTCCGCGC
CGCCTCGCGCCGCCCGCCCCGGCTCTGACTGACCGCGTTACTCCCACAGGTGAGCGGGCGGGAC
GGCCCTTCTCCTCCGGGCTGTAATTAGCGCTTGGTTTAATGACGGCTCGTTTCTTTTCTGTGGC
TGCGTGAAAGCCTTAAAGGGCTCCGGGAGGGCCCTTTGTGCGGGGGGGAGCGGCTCGGGGGGTG
CGTGCGTGTGTGTGTGCGTGGGGAGCGCCGCGTGCGGCCCGCGCTGCCCGGCGGCTGTGAGCGC
TGCGGGCGCGGCGCGGGGCTTTGTGCGCTCCGCGTGTGCGCGAGGGGAGCGCGGCCGGGGGCGG
TGCCCCGCGGTGCGGGGGGGCTGCGAGGGGAACAAAGGCTGCGTGCGGGGTGTGTGCGTGGGGG
GGTGAGCAGGGGGTGTGGGCGCGGCGGTCGGGCTGTAACCCCCCCCTGCACCCCCCTCCCCGAG
TTGCTGAGCACGGCCCGGCTTCGGGTGCGGGGCTCCGTGCGGGGCGTGGCGCGGGGCTCGCCGT
GCCGGGCGGGGGGTGGCGGCAGGTGGGGGTGCCGGGCGGGGCGGGGCCGCCTCGGGCCGGGGAG
GGCTCGGGGGAGGGGCGCGGCGGCCCCCGGAGCGCCGGCGCATAGCTCTTATGATAGCAATGTC
AGCAGTGCCTTTCTCGAAGTGCTTCTGCCGGGTTAAGATTCTAAAATTATCACGGTAGAAACAT
CTTCGGGAGAAGTAAGGTTGACCATACTCTACAGTTGTGTCTAGAGCCTCTGCTAACCATGTTC
ATGCCTTCTTCTTTTTCCTACAGCTCCTGGGCAACGTGCTGGTTATTGTGACCGGTCGCTAGCC
ACCATGGTGAGCAAGGGCGAGGAGCTGTTCACCGGGGTGGTGCCCATCCTGGTCGAGCTGGACG
GCGACGTAAACGGCCACAAGTTCAGCGTGTCCGGCGAGGGCGAGGGCGATGCCACCTACGGCAA
GCTGACCCTGAAGTTCATCTGCACCACCGGCAAGCTGCCCGTGCCCTGGCCCACCCTCGTGACC
ACCCTGACCTACGGCGTGCAGTGCTTCAGCCGCTACCCCGACCACATGAAGCAGCACGACTTCT
TCAAGTCCGCCATGCCCGAAGGCTACGTCCAGGAGCGCACCATCTTCTTCAAGGACGACGGCAA
CTACAAGACCCGCGCCGAGGTGAAGTTCGAGGGCGACACCCTGGTGAACCGCATCGAGCTGAAG
GGCATCGACTTCAAGGAGGACGGCAACATCCTGGGGCACAAGCTGGAGTACAACTACAACAGCC
ACAACGTCTATATCATGGCCGACAAGCAGAAGAACGGCATCAAGGTGAACTTCAAGATCCGCCA
CAACATCGAGGACGGCAGCGTGCAGCTCGCCGACCACTACCAGCAGAACACCCCCATCGGCGAC
GGCCCCGTGCTGCTGCCCGACAACCACTACCTGAGCACCCAGTCCGCCCTGAGCAAAGACCCCA
ACGAGAAGCGCGATCACATGGTCCTGCTGGAGTTCGTGACCGCCGCCGGGATCACTCTCGGCAT
GGACGAGCTGTACAAGTAAcctgcaggcgccggcgCATAGCTCTTATGATAGCAATGTCAGCAG
TGCCTTTCTCCACCTTGACCACGCGTGTTAAGATTCTAAAATTATCTCGTGTGGTAAGTGGTGG
AGAGAAGTAAGGTTGACCATACTCTACAGTTGTGGAGCTCGCTGATCAGCCTCGACTGTGCCTT
CTAGTTGCCAGCCATCTGTTGTTTGCCCCTCCCCCGTGCCTTCCTTGACCCTGGAAGGTGCCAC
TCCCACTGTCCTTTCCTAATAAAATGAGGAAATTGCATCGCATTGTCTGAGTAGGTGTCATTCT
ATTCTGGGGGGTGGGGTGGGGCAGGACAGCAAGGGGGAGGATTGGGAAGACAATAGCAGGCATG
CTGGGGATGCGGTGGGCTCTATGGAAGCTTGAATTCAGCTGACGTGCCTCGGACCGCTAGGAAC
CCCTAGTGATGGAGTTGGCCACTCCCTCTCTGCGCGCTCGCTCGCTCACTGAGGCCGGGCGACC
AAAGGTCGCCCGACGCCCGGGCTTTGCCCGGGCGGCCTCAGTGAGCGAGCGAGCGCGCAG
Exemplary pITR.CAG.miR4i_miR5u-26_EGFP Construct sequence
(SEQ ID NO: 188)
CTGCGCGCTCGCTCGCTCACTGAGGCCGCCCGGGCGTCGGGCGACCTTTGGTCGCCCGGCCTCA
GTGAGCGAGCGAGCGCGCAGAGAGGGAGTGGCCAACTCCATCACTAGGGGTTCCTGCGGCCGCA
CGCGTGACATTGATTATTGACTAGTTATTAATAGTAATCAATTACGGGGTCATTAGTTCATAGC
CCATATATGGAGTTCCGCGTTACATAACTTACGGTAAATGGCCCGCCTGGCTGACCGCCCAACG
ACCCCCGCCCATTGACGTCAATAATGACGTATGTTCCCATAGTAACGCCAATAGGGACTTTCCA
TTGACGTCAATGGGTGGACTATTTACGGTAAACTGCCCACTTGGCAGTACATCAAGTGTATCAT
ATGCCAAGTACGCCCCCTATTGACGTCAATGACGGTAAATGGCCCGCCTGGCATTATGCCCAGT
ACATGACCTTATGGGACTTTCCTACTTGGCAGTACATCTACGTATTAGTCATCGCTATTACCAT
GGGTCGAGGTGAGCCCCACGTTCTGCTTCACTCTCCCCATCTCCCCCCCCTCCCCACCCCCAAT
TTTGTATTTATTTATTTTTTAATTATTTTGTGCAGCGATGGGGGCGGGGGGGGGGGGGGCGCGC
GCCAGGCGGGGCGGGGCGGGGCGAGGGGCGGGGCGGGGCGAGGCGGAGAGGTGCGGCGGCAGCC
AATCAGAGCGGCGCGCTCCGAAAGTTTCCTTTTATGGCGAGGCGGCGGCGGCGGCGGCCCTATA
AAAAGCGAAGCGCGCGGCGGGCGGGAGTCGCTGCGTTGCCTTCGCCCCGTGCCCCGCTCCGCGC
CGCCTCGCGCCGCCCGCCCCGGCTCTGACTGACCGCGTTACTCCCACAGGTGAGCGGGCGGGAC
GGCCCTTCTCCTCCGGGCTGTAATTAGCGCTTGGTTTAATGACGGCTCGTTTCTTTTCTGTGGC
TGCGTGAAAGCCTTAAAGGGCTCCGGGAGGGCCCTTTGTGCGGGGGGGAGCGGCTCGGGGGGTG
CGTGCGTGTGTGTGTGCGTGGGGAGCGCCGCGTGCGGCCCGCGCTGCCCGGCGGCTGTGAGCGC
TGCGGGCGCGGCGCGGGGCTTTGTGCGCTCCGCGTGTGCGCGAGGGGAGCGCGGCCGGGGGCGG
TGCCCCGCGGTGCGGGGGGGCTGCGAGGGGAACAAAGGCTGCGTGCGGGGTGTGTGCGTGGGGG
GGTGAGCAGGGGGTGTGGGCGCGGCGGTCGGGCTGTAACCCCCCCCTGCACCCCCCTCCCCGAG
TTGCTGAGCACGGCCCGGCTTCGGGTGCGGGGCTCCGTGCGGGGCGTGGCGCGGGGCTCGCCGT
GCCGGGCGGGGGGTGGCGGCAGGTGGGGGTGCCGGGCGGGGCGGGGCCGCCTCGGGCCGGGGAG
GGCTCGGGGGAGGGGCGCGGCGGCCCCCGGAGCGCCGGCGGAGCAGGAGGACCAAGGCCCTGGC
GAAGGCCGTGGCCTCGTTCTCGAAGTGCTTCTGCCGGTGTGCAGGTCCCAATGGCCGGTAGAAT
CGTTTCGAGCACGGGGACGCGGGCCTGGACGCCGGCATCCGGGCTCAGGACCCCCCTCTCTAGA
GCCTCTGCTAACCATGTTCATGCCTTCTTCTTTTTCCTACAGCTCCTGGGCAACGTGCTGGTTA
TTGTGACCGGTCGCTAGCCACCATGGTGAGCAAGGGCGAGGAGCTGTTCACCGGGGTGGTGCCC
ATCCTGGTCGAGCTGGACGGCGACGTAAACGGCCACAAGTTCAGCGTGTCCGGCGAGGGCGAGG
GCGATGCCACCTACGGCAAGCTGACCCTGAAGTTCATCTGCACCACCGGCAAGCTGCCCGTGCC
CTGGCCCACCCTCGTGACCACCCTGACCTACGGCGTGCAGTGCTTCAGCCGCTACCCCGACCAC
ATGAAGCAGCACGACTTCTTCAAGTCCGCCATGCCCGAAGGCTACGTCCAGGAGCGCACCATCT
TCTTCAAGGACGACGGCAACTACAAGACCCGCGCCGAGGTGAAGTTCGAGGGCGACACCCTGGT
GAACCGCATCGAGCTGAAGGGCATCGACTTCAAGGAGGACGGCAACATCCTGGGGCACAAGCTG
GAGTACAACTACAACAGCCACAACGTCTATATCATGGCCGACAAGCAGAAGAACGGCATCAAGG
TGAACTTCAAGATCCGCCACAACATCGAGGACGGCAGCGTGCAGCTCGCCGACCACTACCAGCA
GAACACCCCCATCGGCGACGGCCCCGTGCTGCTGCCCGACAACCACTACCTGAGCACCCAGTCC
GCCCTGAGCAAAGACCCCAACGAGAAGCGCGATCACATGGTCCTGCTGGAGTTCGTGACCGCCG
CCGGGATCACTCTCGGCATGGACGAGCTGTACAAGTAAcctgcaggcgccggcgGAGCAGGAGG
ACCAAGGCCCTGGCGAAGGCCGTGGCCTCGTTCTCCACCTTGACCACGCGTTGTGCAGGTCCCA
ATGGGCGTGTGGTAGAGGTGGAGCACGGGGACGCGGGCCTGGACGCCGGCATCCGGGCTCAGGA
CCCCCCTCGAGCTCGCTGATCAGCCTCGACTGTGCCTTCTAGTTGCCAGCCATCTGTTGTTTGC
CCCTCCCCCGTGCCTTCCTTGACCCTGGAAGGTGCCACTCCCACTGTCCTTTCCTAATAAAATG
AGGAAATTGCATCGCATTGTCTGAGTAGGTGTCATTCTATTCTGGGGGGTGGGGTGGGGCAGGA
CAGCAAGGGGGAGGATTGGGAAGACAATAGCAGGCATGCTGGGGATGCGGTGGGCTCTATGGAA
GCTTGAATTCAGCTGACGTGCCTCGGACCGCTAGGAACCCCTAGTGATGGAGTTGGCCACTCCC
TCTCTGCGCGCTCGCTCGCTCACTGAGGCCGGGCGACCAAAGGTCGCCCGACGCCCGGGCTTTG
CCCGGGCGGCCTCAGTGAGCGAGCGAGCGCGCAG
Exemplary pITR.CAG.miR4i_miR5u-96_EGFP Construct sequence
(SEQ ID NO: 189)
CTGCGCGCTCGCTCGCTCACTGAGGCCGCCCGGGCGTCGGGCGACCTTTGGTCGCCCGGCCTCA
GTGAGCGAGCGAGCGCGCAGAGAGGGAGTGGCCAACTCCATCACTAGGGGTTCCTGCGGCCGCA
CGCGTGACATTGATTATTGACTAGTTATTAATAGTAATCAATTACGGGGTCATTAGTTCATAGC
CCATATATGGAGTTCCGCGTTACATAACTTACGGTAAATGGCCCGCCTGGCTGACCGCCCAACG
ACCCCCGCCCATTGACGTCAATAATGACGTATGTTCCCATAGTAACGCCAATAGGGACTTTCCA
TTGACGTCAATGGGTGGACTATTTACGGTAAACTGCCCACTTGGCAGTACATCAAGTGTATCAT
ATGCCAAGTACGCCCCCTATTGACGTCAATGACGGTAAATGGCCCGCCTGGCATTATGCCCAGT
ACATGACCTTATGGGACTTTCCTACTTGGCAGTACATCTACGTATTAGTCATCGCTATTACCAT
GGGTCGAGGTGAGCCCCACGTTCTGCTTCACTCTCCCCATCTCCCCCCCCTCCCCACCCCCAAT
TTTGTATTTATTTATTTTTTAATTATTTTGTGCAGCGATGGGGGCGGGGGGGGGGGGGGCGCGC
GCCAGGCGGGGCGGGGCGGGGCGAGGGGCGGGGCGGGGCGAGGCGGAGAGGTGCGGCGGCAGCC
AATCAGAGCGGCGCGCTCCGAAAGTTTCCTTTTATGGCGAGGCGGCGGCGGCGGCGGCCCTATA
AAAAGCGAAGCGCGCGGCGGGCGGGAGTCGCTGCGTTGCCTTCGCCCCGTGCCCCGCTCCGCGC
CGCCTCGCGCCGCCCGCCCCGGCTCTGACTGACCGCGTTACTCCCACAGGTGAGCGGGCGGGAC
GGCCCTTCTCCTCCGGGCTGTAATTAGCGCTTGGTTTAATGACGGCTCGTTTCTTTTCTGTGGC
TGCGTGAAAGCCTTAAAGGGCTCCGGGAGGGCCCTTTGTGCGGGGGGGAGCGGCTCGGGGGGTG
CGTGCGTGTGTGTGTGCGTGGGGAGCGCCGCGTGCGGCCCGCGCTGCCCGGCGGCTGTGAGCGC
TGCGGGCGCGGCGCGGGGCTTTGTGCGCTCCGCGTGTGCGCGAGGGGAGCGCGGCCGGGGGCGG
TGCCCCGCGGTGCGGGGGGGCTGCGAGGGGAACAAAGGCTGCGTGCGGGGTGTGTGCGTGGGGG
GGTGAGCAGGGGGTGTGGGCGCGGCGGTCGGGCTGTAACCCCCCCCTGCACCCCCCTCCCCGAG
TTGCTGAGCACGGCCCGGCTTCGGGTGCGGGGCTCCGTGCGGGGCGTGGCGCGGGGCTCGCCGT
GCCGGGCGGGGGGTGGCGGCAGGTGGGGGTGCCGGGCGGGGCGGGGCCGCCTCGGGCCGGGGAG
GGCTCGGGGGAGGGGCGCGGCGGCCCCCGGAGCGCCGGCGGTGTCCCCAGAGAGCCCGCACCAG
TGCCATCTGCTTGGCCGATTTCTCGAAGTGCTTCTGCCGGCTTGTGTCTCTCCGCTCTGAGCTG
TGAGGAGCTTTCGGGATATGGGAAAAGCAGGACCCGCAGCTGCGTCCGCCTCCCCTGCATTCTA
GAGCCTCTGCTAACCATGTTCATGCCTTCTTCTTTTTCCTACAGCTCCTGGGCAACGTGCTGGT
TATTGTGACCGGTCGCTAGCCACCATGGTGAGCAAGGGCGAGGAGCTGTTCACCGGGGTGGTGC
CCATCCTGGTCGAGCTGGACGGCGACGTAAACGGCCACAAGTTCAGCGTGTCCGGCGAGGGCGA
GGGCGATGCCACCTACGGCAAGCTGACCCTGAAGTTCATCTGCACCACCGGCAAGCTGCCCGTG
CCCTGGCCCACCCTCGTGACCACCCTGACCTACGGCGTGCAGTGCTTCAGCCGCTACCCCGACC
ACATGAAGCAGCACGACTTCTTCAAGTCCGCCATGCCCGAAGGCTACGTCCAGGAGCGCACCAT
CTTCTTCAAGGACGACGGCAACTACAAGACCCGCGCCGAGGTGAAGTTCGAGGGCGACACCCTG
GTGAACCGCATCGAGCTGAAGGGCATCGACTTCAAGGAGGACGGCAACATCCTGGGGCACAAGC
TGGAGTACAACTACAACAGCCACAACGTCTATATCATGGCCGACAAGCAGAAGAACGGCATCAA
GGTGAACTTCAAGATCCGCCACAACATCGAGGACGGCAGCGTGCAGCTCGCCGACCACTACCAG
CAGAACACCCCCATCGGCGACGGCCCCGTGCTGCTGCCCGACAACCACTACCTGAGCACCCAGT
CCGCCCTGAGCAAAGACCCCAACGAGAAGCGCGATCACATGGTCCTGCTGGAGTTCGTGACCGC
CGCCGGGATCACTCTCGGCATGGACGAGCTGTACAAGTAAcctgcaggcgccggcgGTGTCCCC
AGAGAGCCCGCACCAGTGCCATCTGCTTGGCCGATTTCTCCACCTTGACCACGCGTCTTGTGTC
TCTCCGCTCTGAGGTGACTGGTTGGGTGGAGATATGGGAAAAGCAGGACCCGCAGCTGCGTCCG
CCTCCCCTGCATGAGCTCGCTGATCAGCCTCGACTGTGCCTTCTAGTTGCCAGCCATCTGTTGT
TTGCCCCTCCCCCGTGCCTTCCTTGACCCTGGAAGGTGCCACTCCCACTGTCCTTTCCTAATAA
AATGAGGAAATTGCATCGCATTGTCTGAGTAGGTGTCATTCTATTCTGGGGGGTGGGGTGGGGC
AGGACAGCAAGGGGGAGGATTGGGAAGACAATAGCAGGCATGCTGGGGATGCGGTGGGCTCTAT
GGAAGCTTGAATTCAGCTGACGTGCCTCGGACCGCTAGGAACCCCTAGTGATGGAGTTGGCCAC
TCCCTCTCTGCGCGCTCGCTCGCTCACTGAGGCCGGGCGACCAAAGGTCGCCCGACGCCCGGGC
TTTGCCCGGGCGGCCTCAGTGAGCGAGCGAGCGCGCAG
Exemplary pITR.CAG.miR4i_miR6u-16_EGFP Construct sequence
(SEQ ID NO: 190)
CTGCGCGCTCGCTCGCTCACTGAGGCCGCCCGGGCGTCGGGCGACCTTTGGTCGCCCGGCCTCA
GTGAGCGAGCGAGCGCGCAGAGAGGGAGTGGCCAACTCCATCACTAGGGGTTCCTGCGGCCGCA
CGCGTGACATTGATTATTGACTAGTTATTAATAGTAATCAATTACGGGGTCATTAGTTCATAGC
CCATATATGGAGTTCCGCGTTACATAACTTACGGTAAATGGCCCGCCTGGCTGACCGCCCAACG
ACCCCCGCCCATTGACGTCAATAATGACGTATGTTCCCATAGTAACGCCAATAGGGACTTTCCA
TTGACGTCAATGGGTGGACTATTTACGGTAAACTGCCCACTTGGCAGTACATCAAGTGTATCAT
ATGCCAAGTACGCCCCCTATTGACGTCAATGACGGTAAATGGCCCGCCTGGCATTATGCCCAGT
ACATGACCTTATGGGACTTTCCTACTTGGCAGTACATCTACGTATTAGTCATCGCTATTACCAT
GGGTCGAGGTGAGCCCCACGTTCTGCTTCACTCTCCCCATCTCCCCCCCCTCCCCACCCCCAAT
TTTGTATTTATTTATTTTTTAATTATTTTGTGCAGCGATGGGGGCGGGGGGGGGGGGGGCGCGC
GCCAGGCGGGGCGGGGCGGGGCGAGGGGCGGGGCGGGGCGAGGCGGAGAGGTGCGGCGGCAGCC
AATCAGAGCGGCGCGCTCCGAAAGTTTCCTTTTATGGCGAGGCGGCGGCGGCGGCGGCCCTATA
AAAAGCGAAGCGCGCGGCGGGCGGGAGTCGCTGCGTTGCCTTCGCCCCGTGCCCCGCTCCGCGC
CGCCTCGCGCCGCCCGCCCCGGCTCTGACTGACCGCGTTACTCCCACAGGTGAGCGGGCGGGAC
GGCCCTTCTCCTCCGGGCTGTAATTAGCGCTTGGTTTAATGACGGCTCGTTTCTTTTCTGTGGC
TGCGTGAAAGCCTTAAAGGGCTCCGGGAGGGCCCTTTGTGCGGGGGGGAGCGGCTCGGGGGGTG
CGTGCGTGTGTGTGTGCGTGGGGAGCGCCGCGTGCGGCCCGCGCTGCCCGGCGGCTGTGAGCGC
TGCGGGCGCGGCGCGGGGCTTTGTGCGCTCCGCGTGTGCGCGAGGGGAGCGCGGCCGGGGGCGG
TGCCCCGCGGTGCGGGGGGGCTGCGAGGGGAACAAAGGCTGCGTGCGGGGTGTGTGCGTGGGGG
GGTGAGCAGGGGGTGTGGGCGCGGCGGTCGGGCTGTAACCCCCCCCTGCACCCCCCTCCCCGAG
TTGCTGAGCACGGCCCGGCTTCGGGTGCGGGGCTCCGTGCGGGGCGTGGCGCGGGGCTCGCCGT
GCCGGGCGGGGGGTGGCGGCAGGTGGGGGTGCCGGGCGGGGCGGGGCCGCCTCGGGCCGGGGAG
GGCTCGGGGGAGGGGCGCGGCGGCCCCCGGAGCGCCGGCGCATAGCTCTTATGATAGCAATGTC
AGCAGTGCCTTTCTCGAAGTGCTTCTGCCGGGTTAAGATTCTAAAATTATCACGGTAGAAACAT
CTTCGGGAGAAGTAAGGTTGACCATACTCTACAGTTGTGTCTAGAGCCTCTGCTAACCATGTTC
ATGCCTTCTTCTTTTTCCTACAGCTCCTGGGCAACGTGCTGGTTATTGTGACCGGTCGCTAGCC
ACCATGGTGAGCAAGGGCGAGGAGCTGTTCACCGGGGTGGTGCCCATCCTGGTCGAGCTGGACG
GCGACGTAAACGGCCACAAGTTCAGCGTGTCCGGCGAGGGCGAGGGCGATGCCACCTACGGCAA
GCTGACCCTGAAGTTCATCTGCACCACCGGCAAGCTGCCCGTGCCCTGGCCCACCCTCGTGACC
ACCCTGACCTACGGCGTGCAGTGCTTCAGCCGCTACCCCGACCACATGAAGCAGCACGACTTCT
TCAAGTCCGCCATGCCCGAAGGCTACGTCCAGGAGCGCACCATCTTCTTCAAGGACGACGGCAA
CTACAAGACCCGCGCCGAGGTGAAGTTCGAGGGCGACACCCTGGTGAACCGCATCGAGCTGAAG
GGCATCGACTTCAAGGAGGACGGCAACATCCTGGGGCACAAGCTGGAGTACAACTACAACAGCC
ACAACGTCTATATCATGGCCGACAAGCAGAAGAACGGCATCAAGGTGAACTTCAAGATCCGCCA
CAACATCGAGGACGGCAGCGTGCAGCTCGCCGACCACTACCAGCAGAACACCCCCATCGGCGAC
GGCCCCGTGCTGCTGCCCGACAACCACTACCTGAGCACCCAGTCCGCCCTGAGCAAAGACCCCA
ACGAGAAGCGCGATCACATGGTCCTGCTGGAGTTCGTGACCGCCGCCGGGATCACTCTCGGCAT
GGACGAGCTGTACAAGTAAcctgcaggcgccggcgCATAGCTCTTATGATAGCAATGTCAGCAG
TGCCTATACTGTCATAGTAGTACCAGGTTAAGATTCTAAAATTATCATGGTACTAATGTTGGCA
GTGTAAGTAAGGTTGACCATACTCTACAGTTGTGGAGCTCGCTGATCAGCCTCGACTGTGCCTT
CTAGTTGCCAGCCATCTGTTGTTTGCCCCTCCCCCGTGCCTTCCTTGACCCTGGAAGGTGCCAC
TCCCACTGTCCTTTCCTAATAAAATGAGGAAATTGCATCGCATTGTCTGAGTAGGTGTCATTCT
ATTCTGGGGGGTGGGGTGGGGCAGGACAGCAAGGGGGAGGATTGGGAAGACAATAGCAGGCATG
CTGGGGATGCGGTGGGCTCTATGGAAGCTTGAATTCAGCTGACGTGCCTCGGACCGCTAGGAAC
CCCTAGTGATGGAGTTGGCCACTCCCTCTCTGCGCGCTCGCTCGCTCACTGAGGCCGGGCGACC
AAAGGTCGCCCGACGCCCGGGCTTTGCCCGGGCGGCCTCAGTGAGCGAGCGAGCGCGCAG
Exemplary pITR.CAG.miR4i_miR6u-26_EGFP Construct sequence
(SEQ ID NO: 191)
CTGCGCGCTCGCTCGCTCACTGAGGCCGCCCGGGCGTCGGGCGACCTTTGGTCGCCCGGCCTCA
GTGAGCGAGCGAGCGCGCAGAGAGGGAGTGGCCAACTCCATCACTAGGGGTTCCTGCGGCCGCA
CGCGTGACATTGATTATTGACTAGTTATTAATAGTAATCAATTACGGGGTCATTAGTTCATAGC
CCATATATGGAGTTCCGCGTTACATAACTTACGGTAAATGGCCCGCCTGGCTGACCGCCCAACG
ACCCCCGCCCATTGACGTCAATAATGACGTATGTTCCCATAGTAACGCCAATAGGGACTTTCCA
TTGACGTCAATGGGTGGACTATTTACGGTAAACTGCCCACTTGGCAGTACATCAAGTGTATCAT
ATGCCAAGTACGCCCCCTATTGACGTCAATGACGGTAAATGGCCCGCCTGGCATTATGCCCAGT
ACATGACCTTATGGGACTTTCCTACTTGGCAGTACATCTACGTATTAGTCATCGCTATTACCAT
GGGTCGAGGTGAGCCCCACGTTCTGCTTCACTCTCCCCATCTCCCCCCCCTCCCCACCCCCAAT
TTTGTATTTATTTATTTTTTAATTATTTTGTGCAGCGATGGGGGCGGGGGGGGGGGGGGCGCGC
GCCAGGCGGGGCGGGGCGGGGCGAGGGGCGGGGCGGGGCGAGGCGGAGAGGTGCGGCGGCAGCC
AATCAGAGCGGCGCGCTCCGAAAGTTTCCTTTTATGGCGAGGCGGCGGCGGCGGCGGCCCTATA
AAAAGCGAAGCGCGCGGCGGGCGGGAGTCGCTGCGTTGCCTTCGCCCCGTGCCCCGCTCCGCGC
CGCCTCGCGCCGCCCGCCCCGGCTCTGACTGACCGCGTTACTCCCACAGGTGAGCGGGCGGGAC
GGCCCTTCTCCTCCGGGCTGTAATTAGCGCTTGGTTTAATGACGGCTCGTTTCTTTTCTGTGGC
TGCGTGAAAGCCTTAAAGGGCTCCGGGAGGGCCCTTTGTGCGGGGGGGAGCGGCTCGGGGGGTG
CGTGCGTGTGTGTGTGCGTGGGGAGCGCCGCGTGCGGCCCGCGCTGCCCGGCGGCTGTGAGCGC
TGCGGGCGCGGCGCGGGGCTTTGTGCGCTCCGCGTGTGCGCGAGGGGAGCGCGGCCGGGGGCGG
TGCCCCGCGGTGCGGGGGGGCTGCGAGGGGAACAAAGGCTGCGTGCGGGGTGTGTGCGTGGGGG
GGTGAGCAGGGGGTGTGGGCGCGGCGGTCGGGCTGTAACCCCCCCCTGCACCCCCCTCCCCGAG
TTGCTGAGCACGGCCCGGCTTCGGGTGCGGGGCTCCGTGCGGGGCGTGGCGCGGGGCTCGCCGT
GCCGGGCGGGGGGTGGCGGCAGGTGGGGGTGCCGGGCGGGGCGGGGCCGCCTCGGGCCGGGGAG
GGCTCGGGGGAGGGGCGCGGCGGCCCCCGGAGCGCCGGCGGAGCAGGAGGACCAAGGCCCTGGC
GAAGGCCGTGGCCTCGTTCTCGAAGTGCTTCTGCCGGTGTGCAGGTCCCAATGGCCGGTAGAAT
CGTTTCGAGCACGGGGACGCGGGCCTGGACGCCGGCATCCGGGCTCAGGACCCCCCTCTCTAGA
GCCTCTGCTAACCATGTTCATGCCTTCTTCTTTTTCCTACAGCTCCTGGGCAACGTGCTGGTTA
TTGTGACCGGTCGCTAGCCACCATGGTGAGCAAGGGCGAGGAGCTGTTCACCGGGGTGGTGCCC
ATCCTGGTCGAGCTGGACGGCGACGTAAACGGCCACAAGTTCAGCGTGTCCGGCGAGGGCGAGG
GCGATGCCACCTACGGCAAGCTGACCCTGAAGTTCATCTGCACCACCGGCAAGCTGCCCGTGCC
CTGGCCCACCCTCGTGACCACCCTGACCTACGGCGTGCAGTGCTTCAGCCGCTACCCCGACCAC
ATGAAGCAGCACGACTTCTTCAAGTCCGCCATGCCCGAAGGCTACGTCCAGGAGCGCACCATCT
TCTTCAAGGACGACGGCAACTACAAGACCCGCGCCGAGGTGAAGTTCGAGGGCGACACCCTGGT
GAACCGCATCGAGCTGAAGGGCATCGACTTCAAGGAGGACGGCAACATCCTGGGGCACAAGCTG
GAGTACAACTACAACAGCCACAACGTCTATATCATGGCCGACAAGCAGAAGAACGGCATCAAGG
TGAACTTCAAGATCCGCCACAACATCGAGGACGGCAGCGTGCAGCTCGCCGACCACTACCAGCA
GAACACCCCCATCGGCGACGGCCCCGTGCTGCTGCCCGACAACCACTACCTGAGCACCCAGTCC
GCCCTGAGCAAAGACCCCAACGAGAAGCGCGATCACATGGTCCTGCTGGAGTTCGTGACCGCCG
CCGGGATCACTCTCGGCATGGACGAGCTGTACAAGTAAcctgcaggcgccggcgGAGCAGGAGG
ACCAAGGCCCTGGCGAAGGCCGTGGCCTCGATACTGTCATAGTAGTACCAGTGTGCAGGTCCCA
ATGGCTGGTACTAATGTGACAGTCTCGGGGACGCGGGCCTGGACGCCGGCATCCGGGCTCAGGA
CCCCCCTCGAGCTCGCTGATCAGCCTCGACTGTGCCTTCTAGTTGCCAGCCATCTGTTGTTTGC
CCCTCCCCCGTGCCTTCCTTGACCCTGGAAGGTGCCACTCCCACTGTCCTTTCCTAATAAAATG
AGGAAATTGCATCGCATTGTCTGAGTAGGTGTCATTCTATTCTGGGGGGTGGGGTGGGGCAGGA
CAGCAAGGGGGAGGATTGGGAAGACAATAGCAGGCATGCTGGGGATGCGGTGGGCTCTATGGAA
GCTTGAATTCAGCTGACGTGCCTCGGACCGCTAGGAACCCCTAGTGATGGAGTTGGCCACTCCC
TCTCTGCGCGCTCGCTCGCTCACTGAGGCCGGGCGACCAAAGGTCGCCCGACGCCCGGGCTTTG
CCCGGGCGGCCTCAGTGAGCGAGCGAGCGCGCAG
Exemplary pITR.CAG.miR4i_miR6u-96_EGFP Construct sequence
(SEQ ID NO: 192)
CTGCGCGCTCGCTCGCTCACTGAGGCCGCCCGGGCGTCGGGCGACCTTTGGTCGCCCGGCCTCA
GTGAGCGAGCGAGCGCGCAGAGAGGGAGTGGCCAACTCCATCACTAGGGGTTCCTGCGGCCGCA
CGCGTGACATTGATTATTGACTAGTTATTAATAGTAATCAATTACGGGGTCATTAGTTCATAGC
CCATATATGGAGTTCCGCGTTACATAACTTACGGTAAATGGCCCGCCTGGCTGACCGCCCAACG
ACCCCCGCCCATTGACGTCAATAATGACGTATGTTCCCATAGTAACGCCAATAGGGACTTTCCA
TTGACGTCAATGGGTGGACTATTTACGGTAAACTGCCCACTTGGCAGTACATCAAGTGTATCAT
ATGCCAAGTACGCCCCCTATTGACGTCAATGACGGTAAATGGCCCGCCTGGCATTATGCCCAGT
ACATGACCTTATGGGACTTTCCTACTTGGCAGTACATCTACGTATTAGTCATCGCTATTACCAT
GGGTCGAGGTGAGCCCCACGTTCTGCTTCACTCTCCCCATCTCCCCCCCCTCCCCACCCCCAAT
TTTGTATTTATTTATTTTTTAATTATTTTGTGCAGCGATGGGGGCGGGGGGGGGGGGGGCGCGC
GCCAGGCGGGGCGGGGCGGGGCGAGGGGCGGGGCGGGGCGAGGCGGAGAGGTGCGGCGGCAGCC
AATCAGAGCGGCGCGCTCCGAAAGTTTCCTTTTATGGCGAGGCGGCGGCGGCGGCGGCCCTATA
AAAAGCGAAGCGCGCGGCGGGCGGGAGTCGCTGCGTTGCCTTCGCCCCGTGCCCCGCTCCGCGC
CGCCTCGCGCCGCCCGCCCCGGCTCTGACTGACCGCGTTACTCCCACAGGTGAGCGGGCGGGAC
GGCCCTTCTCCTCCGGGCTGTAATTAGCGCTTGGTTTAATGACGGCTCGTTTCTTTTCTGTGGC
TGCGTGAAAGCCTTAAAGGGCTCCGGGAGGGCCCTTTGTGCGGGGGGGAGCGGCTCGGGGGGTG
CGTGCGTGTGTGTGTGCGTGGGGAGCGCCGCGTGCGGCCCGCGCTGCCCGGCGGCTGTGAGCGC
TGCGGGCGCGGCGCGGGGCTTTGTGCGCTCCGCGTGTGCGCGAGGGGAGCGCGGCCGGGGGCGG
TGCCCCGCGGTGCGGGGGGGCTGCGAGGGGAACAAAGGCTGCGTGCGGGGTGTGTGCGTGGGGG
GGTGAGCAGGGGGTGTGGGCGCGGCGGTCGGGCTGTAACCCCCCCCTGCACCCCCCTCCCCGAG
TTGCTGAGCACGGCCCGGCTTCGGGTGCGGGGCTCCGTGCGGGGCGTGGCGCGGGGCTCGCCGT
GCCGGGCGGGGGGTGGCGGCAGGTGGGGGTGCCGGGCGGGGCGGGGCCGCCTCGGGCCGGGGAG
GGCTCGGGGGAGGGGCGCGGCGGCCCCCGGAGCGCCGGCGGTGTCCCCAGAGAGCCCGCACCAG
TGCCATCTGCTTGGCCGATTTCTCGAAGTGCTTCTGCCGGCTTGTGTCTCTCCGCTCTGAGCTG
TGAGGAGCTTTCGGGATATGGGAAAAGCAGGACCCGCAGCTGCGTCCGCCTCCCCTGCATTCTA
GAGCCTCTGCTAACCATGTTCATGCCTTCTTCTTTTTCCTACAGCTCCTGGGCAACGTGCTGGT
TATTGTGACCGGTCGCTAGCCACCATGGTGAGCAAGGGCGAGGAGCTGTTCACCGGGGTGGTGC
CCATCCTGGTCGAGCTGGACGGCGACGTAAACGGCCACAAGTTCAGCGTGTCCGGCGAGGGCGA
GGGCGATGCCACCTACGGCAAGCTGACCCTGAAGTTCATCTGCACCACCGGCAAGCTGCCCGTG
CCCTGGCCCACCCTCGTGACCACCCTGACCTACGGCGTGCAGTGCTTCAGCCGCTACCCCGACC
ACATGAAGCAGCACGACTTCTTCAAGTCCGCCATGCCCGAAGGCTACGTCCAGGAGCGCACCAT
CTTCTTCAAGGACGACGGCAACTACAAGACCCGCGCCGAGGTGAAGTTCGAGGGCGACACCCTG
GTGAACCGCATCGAGCTGAAGGGCATCGACTTCAAGGAGGACGGCAACATCCTGGGGCACAAGC
TGGAGTACAACTACAACAGCCACAACGTCTATATCATGGCCGACAAGCAGAAGAACGGCATCAA
GGTGAACTTCAAGATCCGCCACAACATCGAGGACGGCAGCGTGCAGCTCGCCGACCACTACCAG
CAGAACACCCCCATCGGCGACGGCCCCGTGCTGCTGCCCGACAACCACTACCTGAGCACCCAGT
CCGCCCTGAGCAAAGACCCCAACGAGAAGCGCGATCACATGGTCCTGCTGGAGTTCGTGACCGC
CGCCGGGATCACTCTCGGCATGGACGAGCTGTACAAGTAAcctgcaggcgccggcgGTGTCCCC
AGAGAGCCCGCACCAGTGCCATCTGCTTGGCCGATATACTGTCATAGTAGTACCAGCTTGTGTC
TCTCCGCTCTGAGCTGTCACTGCTTGACGGTAAATGGGAAAAGCAGGACCCGCAGCTGCGTCCG
CCTCCCCTGCATGAGCTCGCTGATCAGCCTCGACTGTGCCTTCTAGTTGCCAGCCATCTGTTGT
TTGCCCCTCCCCCGTGCCTTCCTTGACCCTGGAAGGTGCCACTCCCACTGTCCTTTCCTAATAA
AATGAGGAAATTGCATCGCATTGTCTGAGTAGGTGTCATTCTATTCTGGGGGGTGGGGTGGGGC
AGGACAGCAAGGGGGAGGATTGGGAAGACAATAGCAGGCATGCTGGGGATGCGGTGGGCTCTAT
GGAAGCTTGAATTCAGCTGACGTGCCTCGGACCGCTAGGAACCCCTAGTGATGGAGTTGGCCAC
TCCCTCTCTGCGCGCTCGCTCGCTCACTGAGGCCGGGCGACCAAAGGTCGCCCGACGCCCGGGC
TTTGCCCGGGCGGCCTCAGTGAGCGAGCGAGCGCGCAG
Exemplary pITR.CAG.miR5-16_EGFP Construct sequence
(SEQ ID NO: 193)
CTGCGCGCTCGCTCGCTCACTGAGGCCGCCCGGGCGTCGGGCGACCTTTGGTCGCCCGGCCTCA
GTGAGCGAGCGAGCGCGCAGAGAGGGAGTGGCCAACTCCATCACTAGGGGTTCCTGCGGCCGCA
CGCGTGACATTGATTATTGACTAGTTATTAATAGTAATCAATTACGGGGTCATTAGTTCATAGC
CCATATATGGAGTTCCGCGTTACATAACTTACGGTAAATGGCCCGCCTGGCTGACCGCCCAACG
ACCCCCGCCCATTGACGTCAATAATGACGTATGTTCCCATAGTAACGCCAATAGGGACTTTCCA
TTGACGTCAATGGGTGGACTATTTACGGTAAACTGCCCACTTGGCAGTACATCAAGTGTATCAT
ATGCCAAGTACGCCCCCTATTGACGTCAATGACGGTAAATGGCCCGCCTGGCATTATGCCCAGT
ACATGACCTTATGGGACTTTCCTACTTGGCAGTACATCTACGTATTAGTCATCGCTATTACCAT
GGGTCGAGGTGAGCCCCACGTTCTGCTTCACTCTCCCCATCTCCCCCCCCTCCCCACCCCCAAT
TTTGTATTTATTTATTTTTTAATTATTTTGTGCAGCGATGGGGGCGGGGGGGGGGGGGGCGCGC
GCCAGGCGGGGCGGGGCGGGGCGAGGGGCGGGGCGGGGCGAGGCGGAGAGGTGCGGCGGCAGCC
AATCAGAGCGGCGCGCTCCGAAAGTTTCCTTTTATGGCGAGGCGGCGGCGGCGGCGGCCCTATA
AAAAGCGAAGCGCGCGGCGGGCGGGAGTCGCTGCGTTGCCTTCGCCCCGTGCCCCGCTCCGCGC
CGCCTCGCGCCGCCCGCCCCGGCTCTGACTGACCGCGTTACTCCCACAGGTGAGCGGGCGGGAC
GGCCCTTCTCCTCCGGGCTGTAATTAGCGCTTGGTTTAATGACGGCTCGTTTCTTTTCTGTGGC
TGCGTGAAAGCCTTAAAGGGCTCCGGGAGGGCCCTTTGTGCGGGGGGGAGCGGCTCGGGGGGTG
CGTGCGTGTGTGTGTGCGTGGGGAGCGCCGCGTGCGGCCCGCGCTGCCCGGCGGCTGTGAGCGC
TGCGGGCGCGGCGCGGGGCTTTGTGCGCTCCGCGTGTGCGCGAGGGGAGCGCGGCCGGGGGCGG
TGCCCCGCGGTGCGGGGGGGCTGCGAGGGGAACAAAGGCTGCGTGCGGGGTGTGTGCGTGGGGG
GGTGAGCAGGGGGTGTGGGCGCGGCGGTCGGGCTGTAACCCCCCCCTGCACCCCCCTCCCCGAG
TTGCTGAGCACGGCCCGGCTTCGGGTGCGGGGCTCCGTGCGGGGCGTGGCGCGGGGCTCGCCGT
GCCGGGCGGGGGGTGGCGGCAGGTGGGGGTGCCGGGCGGGGCGGGGCCGCCTCGGGCCGGGGAG
GGCTCGGGGGAGGGGCGCGGCGGCCCCCGGAGCGCCGGCGCATAGCTCTTATGATAGCAATGTC
AGCAGTGCCTTTCTCCACCTTGACCACGCGTGTTAAGATTCTAAAATTATCTCGTGTGGTAAGT
GGTGGAGAGAAGTAAGGTTGACCATACTCTACAGTTGTGTCTAGAGCCTCTGCTAACCATGTTC
ATGCCTTCTTCTTTTTCCTACAGCTCCTGGGCAACGTGCTGGTTATTGTGACCGGTCGCTAGCC
ACCATGGTGAGCAAGGGCGAGGAGCTGTTCACCGGGGTGGTGCCCATCCTGGTCGAGCTGGACG
GCGACGTAAACGGCCACAAGTTCAGCGTGTCCGGCGAGGGCGAGGGCGATGCCACCTACGGCAA
GCTGACCCTGAAGTTCATCTGCACCACCGGCAAGCTGCCCGTGCCCTGGCCCACCCTCGTGACC
ACCCTGACCTACGGCGTGCAGTGCTTCAGCCGCTACCCCGACCACATGAAGCAGCACGACTTCT
TCAAGTCCGCCATGCCCGAAGGCTACGTCCAGGAGCGCACCATCTTCTTCAAGGACGACGGCAA
CTACAAGACCCGCGCCGAGGTGAAGTTCGAGGGCGACACCCTGGTGAACCGCATCGAGCTGAAG
GGCATCGACTTCAAGGAGGACGGCAACATCCTGGGGCACAAGCTGGAGTACAACTACAACAGCC
ACAACGTCTATATCATGGCCGACAAGCAGAAGAACGGCATCAAGGTGAACTTCAAGATCCGCCA
CAACATCGAGGACGGCAGCGTGCAGCTCGCCGACCACTACCAGCAGAACACCCCCATCGGCGAC
GGCCCCGTGCTGCTGCCCGACAACCACTACCTGAGCACCCAGTCCGCCCTGAGCAAAGACCCCA
ACGAGAAGCGCGATCACATGGTCCTGCTGGAGTTCGTGACCGCCGCCGGGATCACTCTCGGCAT
GGACGAGCTGTACAAGTAAcctgcaggcgccggcgCATAGCTCTTATGATAGCAATGTCAGCAG
TGCCTTTCTCCACCTTGACCACGCGTGTTAAGATTCTAAAATTATCTCGTGTGGTAAGTGGTGG
AGAGAAGTAAGGTTGACCATACTCTACAGTTGTGGAGCTCGCTGATCAGCCTCGACTGTGCCTT
CTAGTTGCCAGCCATCTGTTGTTTGCCCCTCCCCCGTGCCTTCCTTGACCCTGGAAGGTGCCAC
TCCCACTGTCCTTTCCTAATAAAATGAGGAAATTGCATCGCATTGTCTGAGTAGGTGTCATTCT
ATTCTGGGGGGTGGGGTGGGGCAGGACAGCAAGGGGGAGGATTGGGAAGACAATAGCAGGCATG
CTGGGGATGCGGTGGGCTCTATGGAAGCTTGAATTCAGCTGACGTGCCTCGGACCGCTAGGAAC
CCCTAGTGATGGAGTTGGCCACTCCCTCTCTGCGCGCTCGCTCGCTCACTGAGGCCGGGCGACC
AAAGGTCGCCCGACGCCCGGGCTTTGCCCGGGCGGCCTCAGTGAGCGAGCGAGCGCGCAG
Exemplary pITR.CAG.miR5-26_EGFP Construct sequence
(SEQ ID NO: 194)
CTGCGCGCTCGCTCGCTCACTGAGGCCGCCCGGGCGTCGGGCGACCTTTGGTCGCCCGGCCTCA
GTGAGCGAGCGAGCGCGCAGAGAGGGAGTGGCCAACTCCATCACTAGGGGTTCCTGCGGCCGCA
CGCGTGACATTGATTATTGACTAGTTATTAATAGTAATCAATTACGGGGTCATTAGTTCATAGC
CCATATATGGAGTTCCGCGTTACATAACTTACGGTAAATGGCCCGCCTGGCTGACCGCCCAACG
ACCCCCGCCCATTGACGTCAATAATGACGTATGTTCCCATAGTAACGCCAATAGGGACTTTCCA
TTGACGTCAATGGGTGGACTATTTACGGTAAACTGCCCACTTGGCAGTACATCAAGTGTATCAT
ATGCCAAGTACGCCCCCTATTGACGTCAATGACGGTAAATGGCCCGCCTGGCATTATGCCCAGT
ACATGACCTTATGGGACTTTCCTACTTGGCAGTACATCTACGTATTAGTCATCGCTATTACCAT
GGGTCGAGGTGAGCCCCACGTTCTGCTTCACTCTCCCCATCTCCCCCCCCTCCCCACCCCCAAT
TTTGTATTTATTTATTTTTTAATTATTTTGTGCAGCGATGGGGGCGGGGGGGGGGGGGGCGCGC
GCCAGGCGGGGCGGGGCGGGGCGAGGGGCGGGGCGGGGCGAGGCGGAGAGGTGCGGCGGCAGCC
AATCAGAGCGGCGCGCTCCGAAAGTTTCCTTTTATGGCGAGGCGGCGGCGGCGGCGGCCCTATA
AAAAGCGAAGCGCGCGGCGGGCGGGAGTCGCTGCGTTGCCTTCGCCCCGTGCCCCGCTCCGCGC
CGCCTCGCGCCGCCCGCCCCGGCTCTGACTGACCGCGTTACTCCCACAGGTGAGCGGGCGGGAC
GGCCCTTCTCCTCCGGGCTGTAATTAGCGCTTGGTTTAATGACGGCTCGTTTCTTTTCTGTGGC
TGCGTGAAAGCCTTAAAGGGCTCCGGGAGGGCCCTTTGTGCGGGGGGGAGCGGCTCGGGGGGTG
CGTGCGTGTGTGTGTGCGTGGGGAGCGCCGCGTGCGGCCCGCGCTGCCCGGCGGCTGTGAGCGC
TGCGGGCGCGGCGCGGGGCTTTGTGCGCTCCGCGTGTGCGCGAGGGGAGCGCGGCCGGGGGCGG
TGCCCCGCGGTGCGGGGGGGCTGCGAGGGGAACAAAGGCTGCGTGCGGGGTGTGTGCGTGGGGG
GGTGAGCAGGGGGTGTGGGCGCGGCGGTCGGGCTGTAACCCCCCCCTGCACCCCCCTCCCCGAG
TTGCTGAGCACGGCCCGGCTTCGGGTGCGGGGCTCCGTGCGGGGCGTGGCGCGGGGCTCGCCGT
GCCGGGCGGGGGGTGGCGGCAGGTGGGGGTGCCGGGCGGGGCGGGGCCGCCTCGGGCCGGGGAG
GGCTCGGGGGAGGGGCGCGGCGGCCCCCGGAGCGCCGGCGGAGCAGGAGGACCAAGGCCCTGGC
GAAGGCCGTGGCCTCGTTCTCCACCTTGACCACGCGTTGTGCAGGTCCCAATGGGCGTGTGGTA
GAGGTGGAGCACGGGGACGCGGGCCTGGACGCCGGCATCCGGGCTCAGGACCCCCCTCTCTAGA
GCCTCTGCTAACCATGTTCATGCCTTCTTCTTTTTCCTACAGCTCCTGGGCAACGTGCTGGTTA
TTGTGACCGGTCGCTAGCCACCATGGTGAGCAAGGGCGAGGAGCTGTTCACCGGGGTGGTGCCC
ATCCTGGTCGAGCTGGACGGCGACGTAAACGGCCACAAGTTCAGCGTGTCCGGCGAGGGCGAGG
GCGATGCCACCTACGGCAAGCTGACCCTGAAGTTCATCTGCACCACCGGCAAGCTGCCCGTGCC
CTGGCCCACCCTCGTGACCACCCTGACCTACGGCGTGCAGTGCTTCAGCCGCTACCCCGACCAC
ATGAAGCAGCACGACTTCTTCAAGTCCGCCATGCCCGAAGGCTACGTCCAGGAGCGCACCATCT
TCTTCAAGGACGACGGCAACTACAAGACCCGCGCCGAGGTGAAGTTCGAGGGCGACACCCTGGT
GAACCGCATCGAGCTGAAGGGCATCGACTTCAAGGAGGACGGCAACATCCTGGGGCACAAGCTG
GAGTACAACTACAACAGCCACAACGTCTATATCATGGCCGACAAGCAGAAGAACGGCATCAAGG
TGAACTTCAAGATCCGCCACAACATCGAGGACGGCAGCGTGCAGCTCGCCGACCACTACCAGCA
GAACACCCCCATCGGCGACGGCCCCGTGCTGCTGCCCGACAACCACTACCTGAGCACCCAGTCC
GCCCTGAGCAAAGACCCCAACGAGAAGCGCGATCACATGGTCCTGCTGGAGTTCGTGACCGCCG
CCGGGATCACTCTCGGCATGGACGAGCTGTACAAGTAAcctgcaggcgccggcgGAGCAGGAGG
ACCAAGGCCCTGGCGAAGGCCGTGGCCTCGTTCTCCACCTTGACCACGCGTTGTGCAGGTCCCA
ATGGGCGTGTGGTAGAGGTGGAGCACGGGGACGCGGGCCTGGACGCCGGCATCCGGGCTCAGGA
CCCCCCTCGAGCTCGCTGATCAGCCTCGACTGTGCCTTCTAGTTGCCAGCCATCTGTTGTTTGC
CCCTCCCCCGTGCCTTCCTTGACCCTGGAAGGTGCCACTCCCACTGTCCTTTCCTAATAAAATG
AGGAAATTGCATCGCATTGTCTGAGTAGGTGTCATTCTATTCTGGGGGGTGGGGTGGGGCAGGA
CAGCAAGGGGGAGGATTGGGAAGACAATAGCAGGCATGCTGGGGATGCGGTGGGCTCTATGGAA
GCTTGAATTCAGCTGACGTGCCTCGGACCGCTAGGAACCCCTAGTGATGGAGTTGGCCACTCCC
TCTCTGCGCGCTCGCTCGCTCACTGAGGCCGGGCGACCAAAGGTCGCCCGACGCCCGGGCTTTG
CCCGGGCGGCCTCAGTGAGCGAGCGAGCGCGCAG
Exemplary pITR.CAG.miR5-96_EGFP Construct sequence
(SEQ ID NO: 195)
CTGCGCGCTCGCTCGCTCACTGAGGCCGCCCGGGCGTCGGGCGACCTTTGGTCGCCCGGCCTCA
GTGAGCGAGCGAGCGCGCAGAGAGGGAGTGGCCAACTCCATCACTAGGGGTTCCTGCGGCCGCA
CGCGTGACATTGATTATTGACTAGTTATTAATAGTAATCAATTACGGGGTCATTAGTTCATAGC
CCATATATGGAGTTCCGCGTTACATAACTTACGGTAAATGGCCCGCCTGGCTGACCGCCCAACG
ACCCCCGCCCATTGACGTCAATAATGACGTATGTTCCCATAGTAACGCCAATAGGGACTTTCCA
TTGACGTCAATGGGTGGACTATTTACGGTAAACTGCCCACTTGGCAGTACATCAAGTGTATCAT
ATGCCAAGTACGCCCCCTATTGACGTCAATGACGGTAAATGGCCCGCCTGGCATTATGCCCAGT
ACATGACCTTATGGGACTTTCCTACTTGGCAGTACATCTACGTATTAGTCATCGCTATTACCAT
GGGTCGAGGTGAGCCCCACGTTCTGCTTCACTCTCCCCATCTCCCCCCCCTCCCCACCCCCAAT
TTTGTATTTATTTATTTTTTAATTATTTTGTGCAGCGATGGGGGCGGGGGGGGGGGGGGCGCGC
GCCAGGCGGGGCGGGGCGGGGCGAGGGGCGGGGCGGGGCGAGGCGGAGAGGTGCGGCGGCAGCC
AATCAGAGCGGCGCGCTCCGAAAGTTTCCTTTTATGGCGAGGCGGCGGCGGCGGCGGCCCTATA
AAAAGCGAAGCGCGCGGCGGGCGGGAGTCGCTGCGTTGCCTTCGCCCCGTGCCCCGCTCCGCGC
CGCCTCGCGCCGCCCGCCCCGGCTCTGACTGACCGCGTTACTCCCACAGGTGAGCGGGCGGGAC
GGCCCTTCTCCTCCGGGCTGTAATTAGCGCTTGGTTTAATGACGGCTCGTTTCTTTTCTGTGGC
TGCGTGAAAGCCTTAAAGGGCTCCGGGAGGGCCCTTTGTGCGGGGGGGAGCGGCTCGGGGGGTG
CGTGCGTGTGTGTGTGCGTGGGGAGCGCCGCGTGCGGCCCGCGCTGCCCGGCGGCTGTGAGCGC
TGCGGGCGCGGCGCGGGGCTTTGTGCGCTCCGCGTGTGCGCGAGGGGAGCGCGGCCGGGGGCGG
TGCCCCGCGGTGCGGGGGGGCTGCGAGGGGAACAAAGGCTGCGTGCGGGGTGTGTGCGTGGGGG
GGTGAGCAGGGGGTGTGGGCGCGGCGGTCGGGCTGTAACCCCCCCCTGCACCCCCCTCCCCGAG
TTGCTGAGCACGGCCCGGCTTCGGGTGCGGGGCTCCGTGCGGGGCGTGGCGCGGGGCTCGCCGT
GCCGGGCGGGGGGTGGCGGCAGGTGGGGGTGCCGGGCGGGGCGGGGCCGCCTCGGGCCGGGGAG
GGCTCGGGGGAGGGGCGCGGCGGCCCCCGGAGCGCCGGCGGTGTCCCCAGAGAGCCCGCACCAG
TGCCATCTGCTTGGCCGATTTCTCCACCTTGACCACGCGTCTTGTGTCTCTCCGCTCTGAGGTG
ACTGGTTGGGTGGAGATATGGGAAAAGCAGGACCCGCAGCTGCGTCCGCCTCCCCTGCATTCTA
GAGCCTCTGCTAACCATGTTCATGCCTTCTTCTTTTTCCTACAGCTCCTGGGCAACGTGCTGGT
TATTGTGACCGGTCGCTAGCCACCATGGTGAGCAAGGGCGAGGAGCTGTTCACCGGGGTGGTGC
CCATCCTGGTCGAGCTGGACGGCGACGTAAACGGCCACAAGTTCAGCGTGTCCGGCGAGGGCGA
GGGCGATGCCACCTACGGCAAGCTGACCCTGAAGTTCATCTGCACCACCGGCAAGCTGCCCGTG
CCCTGGCCCACCCTCGTGACCACCCTGACCTACGGCGTGCAGTGCTTCAGCCGCTACCCCGACC
ACATGAAGCAGCACGACTTCTTCAAGTCCGCCATGCCCGAAGGCTACGTCCAGGAGCGCACCAT
CTTCTTCAAGGACGACGGCAACTACAAGACCCGCGCCGAGGTGAAGTTCGAGGGCGACACCCTG
GTGAACCGCATCGAGCTGAAGGGCATCGACTTCAAGGAGGACGGCAACATCCTGGGGCACAAGC
TGGAGTACAACTACAACAGCCACAACGTCTATATCATGGCCGACAAGCAGAAGAACGGCATCAA
GGTGAACTTCAAGATCCGCCACAACATCGAGGACGGCAGCGTGCAGCTCGCCGACCACTACCAG
CAGAACACCCCCATCGGCGACGGCCCCGTGCTGCTGCCCGACAACCACTACCTGAGCACCCAGT
CCGCCCTGAGCAAAGACCCCAACGAGAAGCGCGATCACATGGTCCTGCTGGAGTTCGTGACCGC
CGCCGGGATCACTCTCGGCATGGACGAGCTGTACAAGTAAcctgcaggcgccggcgGTGTCCCC
AGAGAGCCCGCACCAGTGCCATCTGCTTGGCCGATTTCTCCACCTTGACCACGCGTCTTGTGTC
TCTCCGCTCTGAGGTGACTGGTTGGGTGGAGATATGGGAAAAGCAGGACCCGCAGCTGCGTCCG
CCTCCCCTGCATGAGCTCGCTGATCAGCCTCGACTGTGCCTTCTAGTTGCCAGCCATCTGTTGT
TTGCCCCTCCCCCGTGCCTTCCTTGACCCTGGAAGGTGCCACTCCCACTGTCCTTTCCTAATAA
AATGAGGAAATTGCATCGCATTGTCTGAGTAGGTGTCATTCTATTCTGGGGGGTGGGGTGGGGC
AGGACAGCAAGGGGGAGGATTGGGAAGACAATAGCAGGCATGCTGGGGATGCGGTGGGCTCTAT
GGAAGCTTGAATTCAGCTGACGTGCCTCGGACCGCTAGGAACCCCTAGTGATGGAGTTGGCCAC
TCCCTCTCTGCGCGCTCGCTCGCTCACTGAGGCCGGGCGACCAAAGGTCGCCCGACGCCCGGGC
TTTGCCCGGGCGGCCTCAGTGAGCGAGCGAGCGCGCAG
Exemplary pITR.CAG.miR5i_miR6u-16_EGFP Construct sequence
(SEQ ID NO: 196)
CTGCGCGCTCGCTCGCTCACTGAGGCCGCCCGGGCGTCGGGCGACCTTTGGTCGCCCGGCCTCA
GTGAGCGAGCGAGCGCGCAGAGAGGGAGTGGCCAACTCCATCACTAGGGGTTCCTGCGGCCGCA
CGCGTGACATTGATTATTGACTAGTTATTAATAGTAATCAATTACGGGGTCATTAGTTCATAGC
CCATATATGGAGTTCCGCGTTACATAACTTACGGTAAATGGCCCGCCTGGCTGACCGCCCAACG
ACCCCCGCCCATTGACGTCAATAATGACGTATGTTCCCATAGTAACGCCAATAGGGACTTTCCA
TTGACGTCAATGGGTGGACTATTTACGGTAAACTGCCCACTTGGCAGTACATCAAGTGTATCAT
ATGCCAAGTACGCCCCCTATTGACGTCAATGACGGTAAATGGCCCGCCTGGCATTATGCCCAGT
ACATGACCTTATGGGACTTTCCTACTTGGCAGTACATCTACGTATTAGTCATCGCTATTACCAT
GGGTCGAGGTGAGCCCCACGTTCTGCTTCACTCTCCCCATCTCCCCCCCCTCCCCACCCCCAAT
TTTGTATTTATTTATTTTTTAATTATTTTGTGCAGCGATGGGGGCGGGGGGGGGGGGGGCGCGC
GCCAGGCGGGGCGGGGCGGGGCGAGGGGCGGGGCGGGGCGAGGCGGAGAGGTGCGGCGGCAGCC
AATCAGAGCGGCGCGCTCCGAAAGTTTCCTTTTATGGCGAGGCGGCGGCGGCGGCGGCCCTATA
AAAAGCGAAGCGCGCGGCGGGCGGGAGTCGCTGCGTTGCCTTCGCCCCGTGCCCCGCTCCGCGC
CGCCTCGCGCCGCCCGCCCCGGCTCTGACTGACCGCGTTACTCCCACAGGTGAGCGGGCGGGAC
GGCCCTTCTCCTCCGGGCTGTAATTAGCGCTTGGTTTAATGACGGCTCGTTTCTTTTCTGTGGC
TGCGTGAAAGCCTTAAAGGGCTCCGGGAGGGCCCTTTGTGCGGGGGGGAGCGGCTCGGGGGGTG
CGTGCGTGTGTGTGTGCGTGGGGAGCGCCGCGTGCGGCCCGCGCTGCCCGGCGGCTGTGAGCGC
TGCGGGCGCGGCGCGGGGCTTTGTGCGCTCCGCGTGTGCGCGAGGGGAGCGCGGCCGGGGGCGG
TGCCCCGCGGTGCGGGGGGGCTGCGAGGGGAACAAAGGCTGCGTGCGGGGTGTGTGCGTGGGGG
GGTGAGCAGGGGGTGTGGGCGCGGCGGTCGGGCTGTAACCCCCCCCTGCACCCCCCTCCCCGAG
TTGCTGAGCACGGCCCGGCTTCGGGTGCGGGGCTCCGTGCGGGGCGTGGCGCGGGGCTCGCCGT
GCCGGGCGGGGGGTGGCGGCAGGTGGGGGTGCCGGGCGGGGCGGGGCCGCCTCGGGCCGGGGAG
GGCTCGGGGGAGGGGCGCGGCGGCCCCCGGAGCGCCGGCGCATAGCTCTTATGATAGCAATGTC
AGCAGTGCCTTTCTCCACCTTGACCACGCGTGTTAAGATTCTAAAATTATCTCGTGTGGTAAGT
GGTGGAGAGAAGTAAGGTTGACCATACTCTACAGTTGTGTCTAGAGCCTCTGCTAACCATGTTC
ATGCCTTCTTCTTTTTCCTACAGCTCCTGGGCAACGTGCTGGTTATTGTGACCGGTCGCTAGCC
ACCATGGTGAGCAAGGGCGAGGAGCTGTTCACCGGGGTGGTGCCCATCCTGGTCGAGCTGGACG
GCGACGTAAACGGCCACAAGTTCAGCGTGTCCGGCGAGGGCGAGGGCGATGCCACCTACGGCAA
GCTGACCCTGAAGTTCATCTGCACCACCGGCAAGCTGCCCGTGCCCTGGCCCACCCTCGTGACC
ACCCTGACCTACGGCGTGCAGTGCTTCAGCCGCTACCCCGACCACATGAAGCAGCACGACTTCT
TCAAGTCCGCCATGCCCGAAGGCTACGTCCAGGAGCGCACCATCTTCTTCAAGGACGACGGCAA
CTACAAGACCCGCGCCGAGGTGAAGTTCGAGGGCGACACCCTGGTGAACCGCATCGAGCTGAAG
GGCATCGACTTCAAGGAGGACGGCAACATCCTGGGGCACAAGCTGGAGTACAACTACAACAGCC
ACAACGTCTATATCATGGCCGACAAGCAGAAGAACGGCATCAAGGTGAACTTCAAGATCCGCCA
CAACATCGAGGACGGCAGCGTGCAGCTCGCCGACCACTACCAGCAGAACACCCCCATCGGCGAC
GGCCCCGTGCTGCTGCCCGACAACCACTACCTGAGCACCCAGTCCGCCCTGAGCAAAGACCCCA
ACGAGAAGCGCGATCACATGGTCCTGCTGGAGTTCGTGACCGCCGCCGGGATCACTCTCGGCAT
GGACGAGCTGTACAAGTAAcctgcaggcgccggcgCATAGCTCTTATGATAGCAATGTCAGCAG
TGCCTATACTGTCATAGTAGTACCAGGTTAAGATTCTAAAATTATCATGGTACTAATGTTGGCA
GTGTAAGTAAGGTTGACCATACTCTACAGTTGTGGAGCTCGCTGATCAGCCTCGACTGTGCCTT
CTAGTTGCCAGCCATCTGTTGTTTGCCCCTCCCCCGTGCCTTCCTTGACCCTGGAAGGTGCCAC
TCCCACTGTCCTTTCCTAATAAAATGAGGAAATTGCATCGCATTGTCTGAGTAGGTGTCATTCT
ATTCTGGGGGGTGGGGTGGGGCAGGACAGCAAGGGGGAGGATTGGGAAGACAATAGCAGGCATG
CTGGGGATGCGGTGGGCTCTATGGAAGCTTGAATTCAGCTGACGTGCCTCGGACCGCTAGGAAC
CCCTAGTGATGGAGTTGGCCACTCCCTCTCTGCGCGCTCGCTCGCTCACTGAGGCCGGGCGACC
AAAGGTCGCCCGACGCCCGGGCTTTGCCCGGGCGGCCTCAGTGAGCGAGCGAGCGCGCAG
Exemplary pITR.CAG.miR5i_miR6u-26_EGFP Construct sequence
(SEQ ID NO: 197)
CTGCGCGCTCGCTCGCTCACTGAGGCCGCCCGGGCGTCGGGCGACCTTTGGTCGCCCGGCCTCA
GTGAGCGAGCGAGCGCGCAGAGAGGGAGTGGCCAACTCCATCACTAGGGGTTCCTGCGGCCGCA
CGCGTGACATTGATTATTGACTAGTTATTAATAGTAATCAATTACGGGGTCATTAGTTCATAGC
CCATATATGGAGTTCCGCGTTACATAACTTACGGTAAATGGCCCGCCTGGCTGACCGCCCAACG
ACCCCCGCCCATTGACGTCAATAATGACGTATGTTCCCATAGTAACGCCAATAGGGACTTTCCA
TTGACGTCAATGGGTGGACTATTTACGGTAAACTGCCCACTTGGCAGTACATCAAGTGTATCAT
ATGCCAAGTACGCCCCCTATTGACGTCAATGACGGTAAATGGCCCGCCTGGCATTATGCCCAGT
ACATGACCTTATGGGACTTTCCTACTTGGCAGTACATCTACGTATTAGTCATCGCTATTACCAT
GGGTCGAGGTGAGCCCCACGTTCTGCTTCACTCTCCCCATCTCCCCCCCCTCCCCACCCCCAAT
TTTGTATTTATTTATTTTTTAATTATTTTGTGCAGCGATGGGGGCGGGGGGGGGGGGGGCGCGC
GCCAGGCGGGGCGGGGCGGGGCGAGGGGCGGGGCGGGGCGAGGCGGAGAGGTGCGGCGGCAGCC
AATCAGAGCGGCGCGCTCCGAAAGTTTCCTTTTATGGCGAGGCGGCGGCGGCGGCGGCCCTATA
AAAAGCGAAGCGCGCGGCGGGCGGGAGTCGCTGCGTTGCCTTCGCCCCGTGCCCCGCTCCGCGC
CGCCTCGCGCCGCCCGCCCCGGCTCTGACTGACCGCGTTACTCCCACAGGTGAGCGGGCGGGAC
GGCCCTTCTCCTCCGGGCTGTAATTAGCGCTTGGTTTAATGACGGCTCGTTTCTTTTCTGTGGC
TGCGTGAAAGCCTTAAAGGGCTCCGGGAGGGCCCTTTGTGCGGGGGGGAGCGGCTCGGGGGGTG
CGTGCGTGTGTGTGTGCGTGGGGAGCGCCGCGTGCGGCCCGCGCTGCCCGGCGGCTGTGAGCGC
TGCGGGCGCGGCGCGGGGCTTTGTGCGCTCCGCGTGTGCGCGAGGGGAGCGCGGCCGGGGGCGG
TGCCCCGCGGTGCGGGGGGGCTGCGAGGGGAACAAAGGCTGCGTGCGGGGTGTGTGCGTGGGGG
GGTGAGCAGGGGGTGTGGGCGCGGCGGTCGGGCTGTAACCCCCCCCTGCACCCCCCTCCCCGAG
TTGCTGAGCACGGCCCGGCTTCGGGTGCGGGGCTCCGTGCGGGGCGTGGCGCGGGGCTCGCCGT
GCCGGGCGGGGGGTGGCGGCAGGTGGGGGTGCCGGGCGGGGCGGGGCCGCCTCGGGCCGGGGAG
GGCTCGGGGGAGGGGCGCGGCGGCCCCCGGAGCGCCGGCGGAGCAGGAGGACCAAGGCCCTGGC
GAAGGCCGTGGCCTCGTTCTCCACCTTGACCACGCGTTGTGCAGGTCCCAATGGGCGTGTGGTA
GAGGTGGAGCACGGGGACGCGGGCCTGGACGCCGGCATCCGGGCTCAGGACCCCCCTCTCTAGA
GCCTCTGCTAACCATGTTCATGCCTTCTTCTTTTTCCTACAGCTCCTGGGCAACGTGCTGGTTA
TTGTGACCGGTCGCTAGCCACCATGGTGAGCAAGGGCGAGGAGCTGTTCACCGGGGTGGTGCCC
ATCCTGGTCGAGCTGGACGGCGACGTAAACGGCCACAAGTTCAGCGTGTCCGGCGAGGGCGAGG
GCGATGCCACCTACGGCAAGCTGACCCTGAAGTTCATCTGCACCACCGGCAAGCTGCCCGTGCC
CTGGCCCACCCTCGTGACCACCCTGACCTACGGCGTGCAGTGCTTCAGCCGCTACCCCGACCAC
ATGAAGCAGCACGACTTCTTCAAGTCCGCCATGCCCGAAGGCTACGTCCAGGAGCGCACCATCT
TCTTCAAGGACGACGGCAACTACAAGACCCGCGCCGAGGTGAAGTTCGAGGGCGACACCCTGGT
GAACCGCATCGAGCTGAAGGGCATCGACTTCAAGGAGGACGGCAACATCCTGGGGCACAAGCTG
GAGTACAACTACAACAGCCACAACGTCTATATCATGGCCGACAAGCAGAAGAACGGCATCAAGG
TGAACTTCAAGATCCGCCACAACATCGAGGACGGCAGCGTGCAGCTCGCCGACCACTACCAGCA
GAACACCCCCATCGGCGACGGCCCCGTGCTGCTGCCCGACAACCACTACCTGAGCACCCAGTCC
GCCCTGAGCAAAGACCCCAACGAGAAGCGCGATCACATGGTCCTGCTGGAGTTCGTGACCGCCG
CCGGGATCACTCTCGGCATGGACGAGCTGTACAAGTAAcctgcaggcgccggcgGAGCAGGAGG
ACCAAGGCCCTGGCGAAGGCCGTGGCCTCGATACTGTCATAGTAGTACCAGTGTGCAGGTCCCA
ATGGCTGGTACTAATGTGACAGTCTCGGGGACGCGGGCCTGGACGCCGGCATCCGGGCTCAGGA
CCCCCCTCGAGCTCGCTGATCAGCCTCGACTGTGCCTTCTAGTTGCCAGCCATCTGTTGTTTGC
CCCTCCCCCGTGCCTTCCTTGACCCTGGAAGGTGCCACTCCCACTGTCCTTTCCTAATAAAATG
AGGAAATTGCATCGCATTGTCTGAGTAGGTGTCATTCTATTCTGGGGGGTGGGGTGGGGCAGGA
CAGCAAGGGGGAGGATTGGGAAGACAATAGCAGGCATGCTGGGGATGCGGTGGGCTCTATGGAA
GCTTGAATTCAGCTGACGTGCCTCGGACCGCTAGGAACCCCTAGTGATGGAGTTGGCCACTCCC
TCTCTGCGCGCTCGCTCGCTCACTGAGGCCGGGCGACCAAAGGTCGCCCGACGCCCGGGCTTTG
CCCGGGCGGCCTCAGTGAGCGAGCGAGCGCGCAG
Exemplary pITR.CAG.miR5i_miR6u-96_EGFP Construct sequence
(SEQ ID NO: 198)
CTGCGCGCTCGCTCGCTCACTGAGGCCGCCCGGGCGTCGGGCGACCTTTGGTCGCCCGGCCTCA
GTGAGCGAGCGAGCGCGCAGAGAGGGAGTGGCCAACTCCATCACTAGGGGTTCCTGCGGCCGCA
CGCGTGACATTGATTATTGACTAGTTATTAATAGTAATCAATTACGGGGTCATTAGTTCATAGC
CCATATATGGAGTTCCGCGTTACATAACTTACGGTAAATGGCCCGCCTGGCTGACCGCCCAACG
ACCCCCGCCCATTGACGTCAATAATGACGTATGTTCCCATAGTAACGCCAATAGGGACTTTCCA
TTGACGTCAATGGGTGGACTATTTACGGTAAACTGCCCACTTGGCAGTACATCAAGTGTATCAT
ATGCCAAGTACGCCCCCTATTGACGTCAATGACGGTAAATGGCCCGCCTGGCATTATGCCCAGT
ACATGACCTTATGGGACTTTCCTACTTGGCAGTACATCTACGTATTAGTCATCGCTATTACCAT
GGGTCGAGGTGAGCCCCACGTTCTGCTTCACTCTCCCCATCTCCCCCCCCTCCCCACCCCCAAT
TTTGTATTTATTTATTTTTTAATTATTTTGTGCAGCGATGGGGGCGGGGGGGGGGGGGGCGCGC
GCCAGGCGGGGCGGGGCGGGGCGAGGGGCGGGGCGGGGCGAGGCGGAGAGGTGCGGCGGCAGCC
AATCAGAGCGGCGCGCTCCGAAAGTTTCCTTTTATGGCGAGGCGGCGGCGGCGGCGGCCCTATA
AAAAGCGAAGCGCGCGGCGGGCGGGAGTCGCTGCGTTGCCTTCGCCCCGTGCCCCGCTCCGCGC
CGCCTCGCGCCGCCCGCCCCGGCTCTGACTGACCGCGTTACTCCCACAGGTGAGCGGGCGGGAC
GGCCCTTCTCCTCCGGGCTGTAATTAGCGCTTGGTTTAATGACGGCTCGTTTCTTTTCTGTGGC
TGCGTGAAAGCCTTAAAGGGCTCCGGGAGGGCCCTTTGTGCGGGGGGGAGCGGCTCGGGGGGTG
CGTGCGTGTGTGTGTGCGTGGGGAGCGCCGCGTGCGGCCCGCGCTGCCCGGCGGCTGTGAGCGC
TGCGGGCGCGGCGCGGGGCTTTGTGCGCTCCGCGTGTGCGCGAGGGGAGCGCGGCCGGGGGCGG
TGCCCCGCGGTGCGGGGGGGCTGCGAGGGGAACAAAGGCTGCGTGCGGGGTGTGTGCGTGGGGG
GGTGAGCAGGGGGTGTGGGCGCGGCGGTCGGGCTGTAACCCCCCCCTGCACCCCCCTCCCCGAG
TTGCTGAGCACGGCCCGGCTTCGGGTGCGGGGCTCCGTGCGGGGCGTGGCGCGGGGCTCGCCGT
GCCGGGCGGGGGGTGGCGGCAGGTGGGGGTGCCGGGCGGGGCGGGGCCGCCTCGGGCCGGGGAG
GGCTCGGGGGAGGGGCGCGGCGGCCCCCGGAGCGCCGGCGGTGTCCCCAGAGAGCCCGCACCAG
TGCCATCTGCTTGGCCGATTTCTCCACCTTGACCACGCGTCTTGTGTCTCTCCGCTCTGAGGTG
ACTGGTTGGGTGGAGATATGGGAAAAGCAGGACCCGCAGCTGCGTCCGCCTCCCCTGCATTCTA
GAGCCTCTGCTAACCATGTTCATGCCTTCTTCTTTTTCCTACAGCTCCTGGGCAACGTGCTGGT
TATTGTGACCGGTCGCTAGCCACCATGGTGAGCAAGGGCGAGGAGCTGTTCACCGGGGTGGTGC
CCATCCTGGTCGAGCTGGACGGCGACGTAAACGGCCACAAGTTCAGCGTGTCCGGCGAGGGCGA
GGGCGATGCCACCTACGGCAAGCTGACCCTGAAGTTCATCTGCACCACCGGCAAGCTGCCCGTG
CCCTGGCCCACCCTCGTGACCACCCTGACCTACGGCGTGCAGTGCTTCAGCCGCTACCCCGACC
ACATGAAGCAGCACGACTTCTTCAAGTCCGCCATGCCCGAAGGCTACGTCCAGGAGCGCACCAT
CTTCTTCAAGGACGACGGCAACTACAAGACCCGCGCCGAGGTGAAGTTCGAGGGCGACACCCTG
GTGAACCGCATCGAGCTGAAGGGCATCGACTTCAAGGAGGACGGCAACATCCTGGGGCACAAGC
TGGAGTACAACTACAACAGCCACAACGTCTATATCATGGCCGACAAGCAGAAGAACGGCATCAA
GGTGAACTTCAAGATCCGCCACAACATCGAGGACGGCAGCGTGCAGCTCGCCGACCACTACCAG
CAGAACACCCCCATCGGCGACGGCCCCGTGCTGCTGCCCGACAACCACTACCTGAGCACCCAGT
CCGCCCTGAGCAAAGACCCCAACGAGAAGCGCGATCACATGGTCCTGCTGGAGTTCGTGACCGC
CGCCGGGATCACTCTCGGCATGGACGAGCTGTACAAGTAAcctgcaggcgccggcgGTGTCCCC
AGAGAGCCCGCACCAGTGCCATCTGCTTGGCCGATATACTGTCATAGTAGTACCAGCTTGTGTC
TCTCCGCTCTGAGCTGTCACTGCTTGACGGTAAATGGGAAAAGCAGGACCCGCAGCTGCGTCCG
CCTCCCCTGCATGAGCTCGCTGATCAGCCTCGACTGTGCCTTCTAGTTGCCAGCCATCTGTTGT
TTGCCCCTCCCCCGTGCCTTCCTTGACCCTGGAAGGTGCCACTCCCACTGTCCTTTCCTAATAA
AATGAGGAAATTGCATCGCATTGTCTGAGTAGGTGTCATTCTATTCTGGGGGGTGGGGTGGGGC
AGGACAGCAAGGGGGAGGATTGGGAAGACAATAGCAGGCATGCTGGGGATGCGGTGGGCTCTAT
GGAAGCTTGAATTCAGCTGACGTGCCTCGGACCGCTAGGAACCCCTAGTGATGGAGTTGGCCAC
TCCCTCTCTGCGCGCTCGCTCGCTCACTGAGGCCGGGCGACCAAAGGTCGCCCGACGCCCGGGC
TTTGCCCGGGCGGCCTCAGTGAGCGAGCGAGCGCGCAG
Exemplary pITR.CAG.miR6-16_EGFP Construct sequence
(SEQ ID NO: 199)
CTGCGCGCTCGCTCGCTCACTGAGGCCGCCCGGGCGTCGGGCGACCTTTGGTCGCCCGGCCTCA
GTGAGCGAGCGAGCGCGCAGAGAGGGAGTGGCCAACTCCATCACTAGGGGTTCCTGCGGCCGCA
CGCGTGACATTGATTATTGACTAGTTATTAATAGTAATCAATTACGGGGTCATTAGTTCATAGC
CCATATATGGAGTTCCGCGTTACATAACTTACGGTAAATGGCCCGCCTGGCTGACCGCCCAACG
ACCCCCGCCCATTGACGTCAATAATGACGTATGTTCCCATAGTAACGCCAATAGGGACTTTCCA
TTGACGTCAATGGGTGGACTATTTACGGTAAACTGCCCACTTGGCAGTACATCAAGTGTATCAT
ATGCCAAGTACGCCCCCTATTGACGTCAATGACGGTAAATGGCCCGCCTGGCATTATGCCCAGT
ACATGACCTTATGGGACTTTCCTACTTGGCAGTACATCTACGTATTAGTCATCGCTATTACCAT
GGGTCGAGGTGAGCCCCACGTTCTGCTTCACTCTCCCCATCTCCCCCCCCTCCCCACCCCCAAT
TTTGTATTTATTTATTTTTTAATTATTTTGTGCAGCGATGGGGGCGGGGGGGGGGGGGGCGCGC
GCCAGGCGGGGCGGGGCGGGGCGAGGGGCGGGGCGGGGCGAGGCGGAGAGGTGCGGCGGCAGCC
AATCAGAGCGGCGCGCTCCGAAAGTTTCCTTTTATGGCGAGGCGGCGGCGGCGGCGGCCCTATA
AAAAGCGAAGCGCGCGGCGGGCGGGAGTCGCTGCGTTGCCTTCGCCCCGTGCCCCGCTCCGCGC
CGCCTCGCGCCGCCCGCCCCGGCTCTGACTGACCGCGTTACTCCCACAGGTGAGCGGGCGGGAC
GGCCCTTCTCCTCCGGGCTGTAATTAGCGCTTGGTTTAATGACGGCTCGTTTCTTTTCTGTGGC
TGCGTGAAAGCCTTAAAGGGCTCCGGGAGGGCCCTTTGTGCGGGGGGGAGCGGCTCGGGGGGTG
CGTGCGTGTGTGTGTGCGTGGGGAGCGCCGCGTGCGGCCCGCGCTGCCCGGCGGCTGTGAGCGC
TGCGGGCGCGGCGCGGGGCTTTGTGCGCTCCGCGTGTGCGCGAGGGGAGCGCGGCCGGGGGCGG
TGCCCCGCGGTGCGGGGGGGCTGCGAGGGGAACAAAGGCTGCGTGCGGGGTGTGTGCGTGGGGG
GGTGAGCAGGGGGTGTGGGCGCGGCGGTCGGGCTGTAACCCCCCCCTGCACCCCCCTCCCCGAG
TTGCTGAGCACGGCCCGGCTTCGGGTGCGGGGCTCCGTGCGGGGCGTGGCGCGGGGCTCGCCGT
GCCGGGCGGGGGGTGGCGGCAGGTGGGGGTGCCGGGCGGGGCGGGGCCGCCTCGGGCCGGGGAG
GGCTCGGGGGAGGGGCGCGGCGGCCCCCGGAGCGCCGGCGCATAGCTCTTATGATAGCAATGTC
AGGAGTGCCTATACTGTCATAGTAGTACGAGGTTAAGATTCTAAAATTATCATGGTACTAATGT
TGGCAGTGTAAGTAAGGTTGACCATACTCTACAGTTGTGTCTAGAGCCTCTGCTAACCATGTTC
ATGCCTTCTTCTTTTTCCTACAGCTCCTGGGCAACGTGCTGGTTATTGTGACCGGTCGCTAGCC
ACCATGGTGAGCAAGGGCGAGGAGCTGTTCACCGGGGTGGTGCCCATCCTGGTCGAGCTGGACG
GCGACGTAAACGGCCACAAGTTCAGCGTGTCCGGCGAGGGCGAGGGCGATGCCACCTACGGCAA
GCTGACCCTGAAGTTCATCTGCACCACCGGCAAGCTGCCCGTGCCCTGGCCCACCCTCGTGACC
ACCCTGACCTACGGCGTGCAGTGCTTCAGCCGCTACCCCGACCACATGAAGCAGCACGACTTCT
TCAAGTCCGCCATGCCCGAAGGCTACGTCCAGGAGCGCACCATCTTCTTCAAGGACGACGGCAA
CTACAAGACCCGCGCCGAGGTGAAGTTCGAGGGCGACACCCTGGTGAACCGCATCGAGCTGAAG
GGCATCGACTTCAAGGAGGACGGCAACATCCTGGGGCACAAGCTGGAGTACAACTACAACAGCC
ACAACGTCTATATCATGGCCGACAAGCAGAAGAACGGCATCAAGGTGAACTTCAAGATCCGCCA
CAACATCGAGGACGGCAGCGTGCAGCTCGCCGACCACTACCAGCAGAACACCCCCATCGGCGAC
GGCCCCGTGCTGCTGCCCGACAACCACTACCTGAGCACCCAGTCCGCCCTGAGCAAAGACCCCA
ACGAGAAGCGCGATCACATGGTCCTGCTGGAGTTCGTGACCGCCGCCGGGATCACTCTCGGCAT
GGACGAGCTGTACAAGTAAcctgcaggcgccggcgCATAGCTCTTATGATAGCAATGTCAGCAG
TGCCTATACTGTCATAGTAGTACCAGGTTAAGATTCTAAAATTATCATGGTACTAATGTTGGCA
GTGTAAGTAAGGTTGACCATACTCTACAGTTGTGGAGCTCGCTGATCAGCCTCGACTGTGCCTT
CTAGTTGCCAGCCATCTGTTGTTTGCCCCTCCCCCGTGCCTTCCTTGACCCTGGAAGGTGCCAC
TCCCACTGTCCTTTCCTAATAAAATGAGGAAATTGCATCGCATTGTCTGAGTAGGTGTCATTCT
ATTCTGGGGGGTGGGGTGGGGCAGGACAGCAAGGGGGAGGATTGGGAAGACAATAGCAGGCATG
CTGGGGATGCGGTGGGCTCTATGGAAGCTTGAATTCAGCTGACGTGCCTCGGACCGCTAGGAAC
CCCTAGTGATGGAGTTGGCCACTCCCTCTCTGCGCGCTCGCTCGCTCACTGAGGCCGGGCGACC
AAAGGTCGCCCGACGCCCGGGCTTTGCCCGGGCGGCCTCAGTGAGCGAGCGAGCGCGCAG
Exemplary pITR.CAG.miR6-26_EGFP Construct sequence
(SEQ ID NO: 200)
CTGCGCGCTCGCTCGCTCACTGAGGCCGCCCGGGCGTCGGGCGACCTTTGGTCGCCCGGCCTCA
GTGAGCGAGCGAGCGCGCAGAGAGGGAGTGGCCAACTCCATCACTAGGGGTTCCTGCGGCCGCA
CGCGTGACATTGATTATTGACTAGTTATTAATAGTAATCAATTACGGGGTCATTAGTTCATAGC
CCATATATGGAGTTCCGCGTTACATAACTTACGGTAAATGGCCCGCCTGGCTGACCGCCCAACG
ACCCCCGCCCATTGACGTCAATAATGACGTATGTTCCCATAGTAACGCCAATAGGGACTTTCCA
TTGACGTCAATGGGTGGACTATTTACGGTAAACTGCCCACTTGGCAGTACATCAAGTGTATCAT
ATGCCAAGTACGCCCCCTATTGACGTCAATGACGGTAAATGGCCCGCCTGGCATTATGCCCAGT
ACATGACCTTATGGGACTTTCCTACTTGGCAGTACATCTACGTATTAGTCATCGCTATTACCAT
GGGTCGAGGTGAGCCCCACGTTCTGCTTCACTCTCCCCATCTCCCCCCCCTCCCCACCCCCAAT
TTTGTATTTATTTATTTTTTAATTATTTTGTGCAGCGATGGGGGCGGGGGGGGGGGGGGCGCGC
GCCAGGCGGGGCGGGGCGGGGCGAGGGGCGGGGCGGGGCGAGGCGGAGAGGTGCGGCGGCAGCC
AATCAGAGCGGCGCGCTCCGAAAGTTTCCTTTTATGGCGAGGCGGCGGCGGCGGCGGCCCTATA
AAAAGCGAAGCGCGCGGCGGGCGGGAGTCGCTGCGTTGCCTTCGCCCCGTGCCCCGCTCCGCGC
CGCCTCGCGCCGCCCGCCCCGGCTCTGACTGACCGCGTTACTCCCACAGGTGAGCGGGCGGGAC
GGCCCTTCTCCTCCGGGCTGTAATTAGCGCTTGGTTTAATGACGGCTCGTTTCTTTTCTGTGGC
TGCGTGAAAGCCTTAAAGGGCTCCGGGAGGGCCCTTTGTGCGGGGGGGAGCGGCTCGGGGGGTG
CGTGCGTGTGTGTGTGCGTGGGGAGCGCCGCGTGCGGCCCGCGCTGCCCGGCGGCTGTGAGCGC
TGCGGGCGCGGCGCGGGGCTTTGTGCGCTCCGCGTGTGCGCGAGGGGAGCGCGGCCGGGGGCGG
TGCCCCGCGGTGCGGGGGGGCTGCGAGGGGAACAAAGGCTGCGTGCGGGGTGTGTGCGTGGGGG
GGTGAGCAGGGGGTGTGGGCGCGGCGGTCGGGCTGTAACCCCCCCCTGCACCCCCCTCCCCGAG
TTGCTGAGCACGGCCCGGCTTCGGGTGCGGGGCTCCGTGCGGGGCGTGGCGCGGGGCTCGCCGT
GCCGGGCGGGGGGTGGCGGCAGGTGGGGGTGCCGGGCGGGGCGGGGCCGCCTCGGGCCGGGGAG
GGCTCGGGGGAGGGGCGCGGCGGCCCCCGGAGCGCCGGCGGAGCAGGAGGACCAAGGCCCTGGC
GAAGGCCGTGGCCTCGATACTGTCATAGTAGTACCAGTGTGCAGGTCCCAATGGCTGGTACTAA
TGTGACAGTCTCGGGGACGCGGGCCTGGACGCCGGCATCCGGGCTCAGGACCCCCCTCTCTAGA
GCCTCTGCTAACCATGTTCATGCCTTCTTCTTTTTCCTACAGCTCCTGGGCAACGTGCTGGTTA
TTGTGACCGGTCGCTAGCCACCATGGTGAGCAAGGGCGAGGAGCTGTTCACCGGGGTGGTGCCC
ATCCTGGTCGAGCTGGACGGCGACGTAAACGGCCACAAGTTCAGCGTGTCCGGCGAGGGCGAGG
GCGATGCCACCTACGGCAAGCTGACCCTGAAGTTCATCTGCACCACCGGCAAGCTGCCCGTGCC
CTGGCCCACCCTCGTGACCACCCTGACCTACGGCGTGCAGTGCTTCAGCCGCTACCCCGACCAC
ATGAAGCAGCACGACTTCTTCAAGTCCGCCATGCCCGAAGGCTACGTCCAGGAGCGCACCATCT
TCTTCAAGGACGACGGCAACTACAAGACCCGCGCCGAGGTGAAGTTCGAGGGCGACACCCTGGT
GAACCGCATCGAGCTGAAGGGCATCGACTTCAAGGAGGACGGCAACATCCTGGGGCACAAGCTG
GAGTACAACTACAACAGCCACAACGTCTATATCATGGCCGACAAGCAGAAGAACGGCATCAAGG
TGAACTTCAAGATCCGCCACAACATCGAGGACGGCAGCGTGCAGCTCGCCGACCACTACCAGCA
GAACACCCCCATCGGCGACGGCCCCGTGCTGCTGCCCGACAACCACTACCTGAGCACCCAGTCC
GCCCTGAGCAAAGACCCCAACGAGAAGCGCGATCACATGGTCCTGCTGGAGTTCGTGACCGCCG
CCGGGATCACTCTCGGCATGGACGAGCTGTACAAGTAAcctgcaggcgccggcgGAGCAGGAGG
ACCAAGGCCCTGGCGAAGGCCGTGGCCTCGATACTGTCATAGTAGTACCAGTGTGCAGGTCCCA
ATGGCTGGTACTAATGTGACAGTCTCGGGGACGCGGGCCTGGACGCCGGCATCCGGGCTCAGGA
CCCCCCTCGAGCTCGCTGATCAGCCTCGACTGTGCCTTCTAGTTGCCAGCCATCTGTTGTTTGC
CCCTCCCCCGTGCCTTCCTTGACCCTGGAAGGTGCCACTCCCACTGTCCTTTCCTAATAAAATG
AGGAAATTGCATCGCATTGTCTGAGTAGGTGTCATTCTATTCTGGGGGGTGGGGTGGGGCAGGA
CAGCAAGGGGGAGGATTGGGAAGACAATAGCAGGCATGCTGGGGATGCGGTGGGCTCTATGGAA
GCTTGAATTCAGCTGACGTGCCTCGGACCGCTAGGAACCCCTAGTGATGGAGTTGGCCACTCCC
TCTCTGCGCGCTCGCTCGCTCACTGAGGCCGGGCGACCAAAGGTCGCCCGACGCCCGGGCTTTG
CCCGGGCGGCCTCAGTGAGCGAGCGAGCGCGCAG
Exemplary pITR.CAG.miR6-96_EGFP Construct sequence
(SEQ ID NO: 201)
CTGCGCGCTCGCTCGCTCACTGAGGCCGCCCGGGCGTCGGGCGACCTTTGGTCGCCCGGCCTCA
GTGAGCGAGCGAGCGCGCAGAGAGGGAGTGGCCAACTCCATCACTAGGGGTTCCTGCGGCCGCA
CGCGTGACATTGATTATTGACTAGTTATTAATAGTAATCAATTACGGGGTCATTAGTTCATAGC
CCATATATGGAGTTCCGCGTTACATAACTTACGGTAAATGGCCCGCCTGGCTGACCGCCCAACG
ACCCCCGCCCATTGACGTCAATAATGACGTATGTTCCCATAGTAACGCCAATAGGGACTTTCCA
TTGACGTCAATGGGTGGACTATTTACGGTAAACTGCCCACTTGGCAGTACATCAAGTGTATCAT
ATGCCAAGTACGCCCCCTATTGACGTCAATGACGGTAAATGGCCCGCCTGGCATTATGCCCAGT
ACATGACCTTATGGGACTTTCCTACTTGGCAGTACATCTACGTATTAGTCATCGCTATTACCAT
GGGTCGAGGTGAGCCCCACGTTCTGCTTCACTCTCCCCATCTCCCCCCCCTCCCCACCCCCAAT
TTTGTATTTATTTATTTTTTAATTATTTTGTGCAGCGATGGGGGCGGGGGGGGGGGGGGCGCGC
GCCAGGCGGGGCGGGGCGGGGCGAGGGGCGGGGCGGGGCGAGGCGGAGAGGTGCGGCGGCAGCC
AATCAGAGCGGCGCGCTCCGAAAGTTTCCTTTTATGGCGAGGCGGCGGCGGCGGCGGCCCTATA
AAAAGCGAAGCGCGCGGCGGGCGGGAGTCGCTGCGTTGCCTTCGCCCCGTGCCCCGCTCCGCGC
CGCCTCGCGCCGCCCGCCCCGGCTCTGACTGACCGCGTTACTCCCACAGGTGAGCGGGCGGGAC
GGCCCTTCTCCTCCGGGCTGTAATTAGCGCTTGGTTTAATGACGGCTCGTTTCTTTTCTGTGGC
TGCGTGAAAGCCTTAAAGGGCTCCGGGAGGGCCCTTTGTGCGGGGGGGAGCGGCTCGGGGGGTG
CGTGCGTGTGTGTGTGCGTGGGGAGCGCCGCGTGCGGCCCGCGCTGCCCGGCGGCTGTGAGCGC
TGCGGGCGCGGCGCGGGGCTTTGTGCGCTCCGCGTGTGCGCGAGGGGAGCGCGGCCGGGGGCGG
TGCCCCGCGGTGCGGGGGGGCTGCGAGGGGAACAAAGGCTGCGTGCGGGGTGTGTGCGTGGGGG
GGTGAGCAGGGGGTGTGGGCGCGGCGGTCGGGCTGTAACCCCCCCCTGCACCCCCCTCCCCGAG
TTGCTGAGCACGGCCCGGCTTCGGGTGCGGGGCTCCGTGCGGGGCGTGGCGCGGGGCTCGCCGT
GCCGGGCGGGGGGTGGCGGCAGGTGGGGGTGCCGGGCGGGGCGGGGCCGCCTCGGGCCGGGGAG
GGCTCGGGGGAGGGGCGCGGCGGCCCCCGGAGCGCCGGCGGTGTCCCCAGAGAGCCCGCACCAG
TGCCATCTGCTTGGCCGATATACTGTCATAGTAGTACCAGCTTGTGTCTCTCCGCTCTGAGCTG
TCACTGCTTGACGGTAAATGGGAAAAGCAGGACCCGCAGCTGCGTCCGCCTCCCCTGCATTCTA
GAGCCTCTGCTAACCATGTTCATGCCTTCTTCTTTTTCCTACAGCTCCTGGGCAACGTGCTGGT
TATTGTGACCGGTCGCTAGCCACCATGGTGAGCAAGGGCGAGGAGCTGTTCACCGGGGTGGTGC
CCATCCTGGTCGAGCTGGACGGCGACGTAAACGGCCACAAGTTCAGCGTGTCCGGCGAGGGCGA
GGGCGATGCCACCTACGGCAAGCTGACCCTGAAGTTCATCTGCACCACCGGCAAGCTGCCCGTG
CCCTGGCCCACCCTCGTGACCACCCTGACCTACGGCGTGCAGTGCTTCAGCCGCTACCCCGACC
ACATGAAGCAGCACGACTTCTTCAAGTCCGCCATGCCCGAAGGCTACGTCCAGGAGCGCACCAT
CTTCTTCAAGGACGACGGCAACTACAAGACCCGCGCCGAGGTGAAGTTCGAGGGCGACACCCTG
GTGAACCGCATCGAGCTGAAGGGCATCGACTTCAAGGAGGACGGCAACATCCTGGGGCACAAGC
TGGAGTACAACTACAACAGCCACAACGTCTATATCATGGCCGACAAGCAGAAGAACGGCATCAA
GGTGAACTTCAAGATCCGCCACAACATCGAGGACGGCAGCGTGCAGCTCGCCGACCACTACCAG
CAGAACACCCCCATCGGCGACGGCCCCGTGCTGCTGCCCGACAACCACTACCTGAGCACCCAGT
CCGCCCTGAGCAAAGACCCCAACGAGAAGCGCGATCACATGGTCCTGCTGGAGTTCGTGACCGC
CGCCGGGATCACTCTCGGCATGGACGAGCTGTACAAGTAAcctgcaggcgccggcgGTGTCCCC
AGAGAGCCCGCACCAGTGCCATCTGCTTGGCCGATATACTGTCATAGTAGTACCAGCTTGTGTC
TCTCCGCTCTGAGCTGTCACTGCTTGACGGTAAATGGGAAAAGCAGGACCCGCAGCTGCGTCCG
CCTCCCCTGCATGAGCTCGCTGATCAGCCTCGACTGTGCCTTCTAGTTGCCAGCCATCTGTTGT
TTGCCCCTCCCCCGTGCCTTCCTTGACCCTGGAAGGTGCCACTCCCACTGTCCTTTCCTAATAA
AATGAGGAAATTGCATCGCATTGTCTGAGTAGGTGTCATTCTATTCTGGGGGGTGGGGTGGGGC
AGGACAGCAAGGGGGAGGATTGGGAAGACAATAGCAGGCATGCTGGGGATGCGGTGGGCTCTAT
GGAAGCTTGAATTCAGCTGACGTGCCTCGGACCGCTAGGAACCCCTAGTGATGGAGTTGGCCAC
TCCCTCTCTGCGCGCTCGCTCGCTCACTGAGGCCGGGCGACCAAAGGTCGCCCGACGCCCGGGC
TTTGCCCGGGCGGCCTCAGTGAGCGAGCGAGCGCGCAG

[0366] Exemplary miRNA Construct Sequences (Part 2)

Exemplary pITR.CAG.miR1-155_EGFP
sequence
(SEQ ID NO: 202)
CTGCGCGCTCGCTCGCTCACTGAGGCCGCCCGGGCGTCGGGCGACCT
TTGGTCGCCCGGCCTCAGTGAGCGAGCGAGCGCGCAGAGAGGGAGTG
GCCAACTCCATCACTAGGGGTTCCTGCGGCCGCACGCGTGACATTGA
TTATTGACTAGTTATTAATAGTAATCAATTACGGGGTCATTAGTTCA
TAGCCCATATATGGAGTTCCGCGTTACATAACTTACGGTAAATGGCC
CGCCTGGCTGACCGCCCAACGACCCCCGCCCATTGACGTCAATAATG
ACGTATGTTCCCATAGTAACGCCAATAGGGACTTTCCATTGACGTCA
ATGGGTGGACTATTTACGGTAAACTGCCCACTTGGCAGTACATCAAG
TGTATCATATGCCAAGTACGCCCCCTATTGACGTCAATGACGGTAAA
TGGCCCGCCTGGCATTATGCCCAGTACATGACCTTATGGGACTTTCC
TACTTGGCAGTACATCTACGTATTAGTCATCGCTATTACCATGGGTC
GAGGTGAGCCCCACGTTCTGCTTCACTCTCCCCATCTCCCCCCCCTC
CCCACCCCCAATTTTGTATTTATTTATTTTTTAATTATTTTGTGCAG
CGATGGGGGCGGGGGGGGGGGGGGCGCGCGCCAGGCGGGGCGGGGCG
GGGCGAGGGGCGGGGCGGGGCGAGGCGGAGAGGTGCGGCGGCAGCCA
ATCAGAGCGGCGCGCTCCGAAAGTTTCCTTTTATGGCGAGGCGGCGG
CGGCGGCGGCCCTATAAAAAGCGAAGCGCGCGGCGGGCGGGAGTCGC
TGCGTTGCCTTCGCCCCGTGCCCCGCTCCGCGCCGCCTCGCGCCGCC
CGCCCCGGCTCTGACTGACCGCGTTACTCCCACAGGTGAGCGGGCGG
GACGGCCCTTCTCCTCCGGGCTGTAATTAGCGCTTGGTTTAATGACG
GCTCGTTTCTTTTCTGTGGCTGCGTGAAAGCCTTAAAGGGCTCCGGG
AGGGCCCTTTGTGCGGGGGGGAGCGGCTCGGGGGGTGCGTGCGTGTG
TGTGTGCGTGGGGAGCGCCGCGTGCGGCCCGCGCTGCCCGGCGGCTG
TGAGCGCTGCGGGCGCGGCGCGGGGCTTTGTGCGCTCCGCGTGTGCG
CGAGGGGAGCGCGGCCGGGGGCGGTGCCCCGCGGTGCGGGGGGGCTG
CGAGGGGAACAAAGGCTGCGTGCGGGGTGTGTGCGTGGGGGGGTGAG
CAGGGGGTGTGGGCGCGGCGGTCGGGCTGTAACCCCCCCCTGCACCC
CCCTCCCCGAGTTGCTGAGCACGGCCCGGCTTCGGGTGCGGGGCTCC
GTGCGGGGCGTGGCGCGGGGCTCGCCGTGCCGGGCGGGGGGTGGCGG
CAGGTGGGGGTGCCGGGCGGGGCGGGGCCGCCTCGGGCCGGGGAGGG
CTCGGGGGAGGGGCGCGGCGGCCCCCGGAGCGCCGGCGtcctctgag
tgctgaaggcttgctgtaggctgtatgctgTTGAGAATCCTGATGGA
GCgggtttttgcctccaactgacccGCTCATAGGATTCTCAAcagtg
tatgatgcctgttactagcattcacatggaTCTAGAGCCTCTGCTAA
CCATGTTCATGCCTTCTTCTTTTTCCTACAGCTCCTGGGCAACGTGC
TGGTTATTGTGACCGGTCGCTAGCCACCATGGTGAGCAAGGGCGAGG
AGCTGTTCACCGGGGTGGTGCCCATCCTGGTCGAGCTGGACGGCGAC
GTAAACGGCCACAAGTTCAGCGTGTCCGGCGAGGGCGAGGGCGATGC
CACCTACGGCAAGCTGACCCTGAAGTTCATCTGCACCACCGGCAAGC
TGCCCGTGCCCTGGCCCACCCTCGTGACCACCCTGACCTACGGCGTG
CAGTGCTTCAGCCGCTACCCCGACCACATGAAGCAGCACGACTTCTT
CAAGTCCGCCATGCCCGAAGGCTACGTCCAGGAGCGCACCATCTTCT
TCAAGGACGACGGCAACTACAAGACCCGCGCCGAGGTGAAGTTCGAG
GGCGACACCCTGGTGAACCGCATCGAGCTGAAGGGCATCGACTTCAA
GGAGGACGGCAACATCCTGGGGCACAAGCTGGAGTACAACTACAACA
GCCACAACGTCTATATCATGGCCGACAAGCAGAAGAACGGCATCAAG
GTGAACTTCAAGATCCGCCACAACATCGAGGACGGCAGCGTGCAGCT
CGCCGACCACTACCAGCAGAACACCCCCATCGGCGACGGCCCCGTGC
TGCTGCCCGACAACCACTACCTGAGCACCCAGTCCGCCCTGAGCAAA
GACCCCAACGAGAAGCGCGATCACATGGTCCTGCTGGAGTTCGTGAC
CGCCGCCGGGATCACTCTCGGCATGGACGAGCTGTACAAGTAAcctg
caggcgccggcgtcctctgagtgctgaaggcttgctgtaggctgtat
gctgTTGAGAATCCTGATGGAGCgggtttttgcctccaactgacccG
CTCATAGGATTCTCAAcagtgtatgatgcctgttactagcattcaca
tggaGAGCTCGCTGATCAGCCTCGACTGTGCCTTCTAGTTGCCAGCC
ATCTGTTGTTTGCCCCTCCCCCGTGCCTTCCTTGACCCTGGAAGGTG
CCACTCCCACTGTCCTTTCCTAATAAAATGAGGAAATTGCATCGCAT
TGTCTGAGTAGGTGTCATTCTATTCTGGGGGGTGGGGTGGGGCAGGA
CAGCAAGGGGGAGGATTGGGAAGACAATAGCAGGCATGCTGGGGATG
CGGTGGGCTCTATGGAAGCTTGAATTCAGCTGACGTGCCTCGGACCG
CTAGGAACCCCTAGTGATGGAGTTGGCCACTCCCTCTCTGCGCGCTC
GCTCGCTCACTGAGGCCGGGCGACCAAAGGTCGCCCGACGCCCGGGC
TTTGCCCGGGCGGCCTCAGTGAGCGAGCGAGCGCGCAG
Exemplary pITR.CAG.miR1i-155_EGFP
sequence
(SEQ ID NO: 203)
CTGCGCGCTCGCTCGCTCACTGAGGCCGCCCGGGCGTCGGGCGACCT
TTGGTCGCCCGGCCTCAGTGAGCGAGCGAGCGCGCAGAGAGGGAGTG
GCCAACTCCATCACTAGGGGTTCCTGCGGCCGCACGCGTGACATTGA
TTATTGACTAGTTATTAATAGTAATCAATTACGGGGTCATTAGTTCA
TAGCCCATATATGGAGTTCCGCGTTACATAACTTACGGTAAATGGCC
CGCCTGGCTGACCGCCCAACGACCCCCGCCCATTGACGTCAATAATG
ACGTATGTTCCCATAGTAACGCCAATAGGGACTTTCCATTGACGTCA
ATGGGTGGACTATTTACGGTAAACTGCCCACTTGGCAGTACATCAAG
TGTATCATATGCCAAGTACGCCCCCTATTGACGTCAATGACGGTAAA
TGGCCCGCCTGGCATTATGCCCAGTACATGACCTTATGGGACTTTCC
TACTTGGCAGTACATCTACGTATTAGTCATCGCTATTACCATGGGTC
GAGGTGAGCCCCACGTTCTGCTTCACTCTCCCCATCTCCCCCCCCTC
CCCACCCCCAATTTTGTATTTATTTATTTTTTAATTATTTTGTGCAG
CGATGGGGGCGGGGGGGGGGGGGGCGCGCGCCAGGCGGGGCGGGGCG
GGGCGAGGGGCGGGGCGGGGCGAGGCGGAGAGGTGCGGCGGCAGCCA
ATCAGAGCGGCGCGCTCCGAAAGTTTCCTTTTATGGCGAGGCGGCGG
CGGCGGCGGCCCTATAAAAAGCGAAGCGCGCGGCGGGCGGGAGTCGC
TGCGTTGCCTTCGCCCCGTGCCCCGCTCCGCGCCGCCTCGCGCCGCC
CGCCCCGGCTCTGACTGACCGCGTTACTCCCACAGGTGAGCGGGCGG
GACGGCCCTTCTCCTCCGGGCTGTAATTAGCGCTTGGTTTAATGACG
GCTCGTTTCTTTTCTGTGGCTGCGTGAAAGCCTTAAAGGGCTCCGGG
AGGGCCCTTTGTGCGGGGGGGAGCGGCTCGGGGGGTGCGTGCGTGTG
TGTGTGCGTGGGGAGCGCCGCGTGCGGCCCGCGCTGCCCGGCGGCTG
TGAGCGCTGCGGGCGCGGCGCGGGGCTTTGTGCGCTCCGCGTGTGCG
CGAGGGGAGCGCGGCCGGGGGCGGTGCCCCGCGGTGCGGGGGGGCTG
CGAGGGGAACAAAGGCTGCGTGCGGGGTGTGTGCGTGGGGGGGTGAG
CAGGGGGTGTGGGCGCGGCGGTCGGGCTGTAACCCCCCCCTGCACCC
CCCTCCCCGAGTTGCTGAGCACGGCCCGGCTTCGGGTGCGGGGCTCC
GTGCGGGGCGTGGCGCGGGGCTCGCCGTGCCGGGCGGGGGGTGGCGG
CAGGTGGGGGTGCCGGGCGGGGCGGGGCCGCCTCGGGCCGGGGAGGG
CTCGGGGGAGGGGCGCGGCGGCCCCCGGAGCGCCGGCGtcctctgag
tgctgaaggcttgctgtaggctgtatgctgTTGAGAATCCTGATGGA
GCgggtttttgcctccaactgacccGCTCATAGGATTCTCAAcagtg
tatgatgcctgttactagcattcacatggaTCTAGAGCCTCTGCTAA
CCATGTTCATGCCTTCTTCTTTTTCCTACAGCTCCTGGGCAACGTGC
TGGTTATTGTGACCGGTCGCTAGCCACCATGGTGAGCAAGGGCGAGG
AGCTGTTCACCGGGGTGGTGCCCATCCTGGTCGAGCTGGACGGCGAC
GTAAACGGCCACAAGTTCAGCGTGTCCGGCGAGGGCGAGGGCGATGC
CACCTACGGCAAGCTGACCCTGAAGTTCATCTGCACCACCGGCAAGC
TGCCCGTGCCCTGGCCCACCCTCGTGACCACCCTGACCTACGGCGTG
CAGTGCTTCAGCCGCTACCCCGACCACATGAAGCAGCACGACTTCTT
CAAGTCCGCCATGCCCGAAGGCTACGTCCAGGAGCGCACCATCTTCT
TCAAGGACGACGGCAACTACAAGACCCGCGCCGAGGTGAAGTTCGAG
GGCGACACCCTGGTGAACCGCATCGAGCTGAAGGGCATCGACTTCAA
GGAGGACGGCAACATCCTGGGGCACAAGCTGGAGTACAACTACAACA
GCCACAACGTCTATATCATGGCCGACAAGCAGAAGAACGGCATCAAG
GTGAACTTCAAGATCCGCCACAACATCGAGGACGGCAGCGTGCAGCT
CGCCGACCACTACCAGCAGAACACCCCCATCGGCGACGGCCCCGTGC
TGCTGCCCGACAACCACTACCTGAGCACCCAGTCCGCCCTGAGCAAA
GACCCCAACGAGAAGCGCGATCACATGGTCCTGCTGGAGTTCGTGAC
CGCCGCCGGGATCACTCTCGGCATGGACGAGCTGTACAAGTAAGAGC
TCGCTGATCAGCCTCGACTGTGCCTTCTAGTTGCCAGCCATCTGTTG
TTTGCCCCTCCCCCGTGCCTTCCTTGACCCTGGAAGGTGCCACTCCC
ACTGTCCTTTCCTAATAAAATGAGGAAATTGCATCGCATTGTCTGAG
TAGGTGTCATTCTATTCTGGGGGGTGGGGTGGGGCAGGACAGCAAGG
GGGAGGATTGGGAAGACAATAGCAGGCATGCTGGGGATGCGGTGGGC
TCTATGGAAGCTTGAATTCAGCTGACGTGCCTCGGACCGCTAGGAAC
CCCTAGTGATGGAGTTGGCCACTCCCTCTCTGCGCGCTCGCTCGCTC
ACTGAGGCCGGGCGACCAAAGGTCGCCCGACGCCCGGGCTTTGCCCG
GGCGGCCTCAGTGAGCGAGCGAGCGCGCAG
Exemplary pITR.CAG.miR1u-155_EGFP
sequence
(SEQ ID NO: 204)
CTGCGCGCTCGCTCGCTCACTGAGGCCGCCCGGGCGTCGGGCGACCT
TTGGTCGCCCGGCCTCAGTGAGCGAGCGAGCGCGCAGAGAGGGAGTG
GCCAACTCCATCACTAGGGGTTCCTGCGGCCGCACGCGTGACATTGA
TTATTGACTAGTTATTAATAGTAATCAATTACGGGGTCATTAGTTCA
TAGCCCATATATGGAGTTCCGCGTTACATAACTTACGGTAAATGGCC
CGCCTGGCTGACCGCCCAACGACCCCCGCCCATTGACGTCAATAATG
ACGTATGTTCCCATAGTAACGCCAATAGGGACTTTCCATTGACGTCA
ATGGGTGGACTATTTACGGTAAACTGCCCACTTGGCAGTACATCAAG
TGTATCATATGCCAAGTACGCCCCCTATTGACGTCAATGACGGTAAA
TGGCCCGCCTGGCATTATGCCCAGTACATGACCTTATGGGACTTTCC
TACTTGGCAGTACATCTACGTATTAGTCATCGCTATTACCATGGGTC
GAGGTGAGCCCCACGTTCTGCTTCACTCTCCCCATCTCCCCCCCCTC
CCCACCCCCAATTTTGTATTTATTTATTTTTTAATTATTTTGTGCAG
CGATGGGGGCGGGGGGGGGGGGGGCGCGCGCCAGGCGGGGCGGGGCG
GGGCGAGGGGCGGGGCGGGGCGAGGCGGAGAGGTGCGGCGGCAGCCA
ATCAGAGCGGCGCGCTCCGAAAGTTTCCTTTTATGGCGAGGCGGCGG
CGGCGGCGGCCCTATAAAAAGCGAAGCGCGCGGCGGGCGGGAGTCGC
TGCGTTGCCTTCGCCCCGTGCCCCGCTCCGCGCCGCCTCGCGCCGCC
CGCCCCGGCTCTGACTGACCGCGTTACTCCCACAGGTGAGCGGGCGG
GACGGCCCTTCTCCTCCGGGCTGTAATTAGCGCTTGGTTTAATGACG
GCTCGTTTCTTTTCTGTGGCTGCGTGAAAGCCTTAAAGGGCTCCGGG
AGGGCCCTTTGTGCGGGGGGGAGCGGCTCGGGGGGTGCGTGCGTGTG
TGTGTGCGTGGGGAGCGCCGCGTGCGGCCCGCGCTGCCCGGCGGCTG
TGAGCGCTGCGGGCGCGGCGCGGGGCTTTGTGCGCTCCGCGTGTGCG
CGAGGGGAGCGCGGCCGGGGGCGGTGCCCCGCGGTGCGGGGGGGCTG
CGAGGGGAACAAAGGCTGCGTGCGGGGTGTGTGCGTGGGGGGGTGAG
CAGGGGGTGTGGGCGCGGCGGTCGGGCTGTAACCCCCCCCTGCACCC
CCCTCCCCGAGTTGCTGAGCACGGCCCGGCTTCGGGTGCGGGGCTCC
GTGCGGGGCGTGGCGCGGGGCTCGCCGTGCCGGGCGGGGGGTGGCGG
CAGGTGGGGGTGCCGGGCGGGGCGGGGCCGCCTCGGGCCGGGGAGGG
CTCGGGGGAGGGGCGCGGCGGCCCCCGGAGCGCCGGCGGCTGTCGAG
GCGCGGCGAGCCGCAGCCATTGCCTTTTATGGTAATCGTGCGAGAGG
GCGCAGGGACTTCCTTTGTCCCAAATCTGTGCGGAGCCGAAATCTGG
GAGGCGCCGCCGCACCCCCTCTAGCGGGCGCGGGGCGAAGCGGTGCG
GCGCCGGCAGGAAGGAAATGGGCGGGGAGGGCCTTCGTGCGTCGCCG
CGCCGCCGTCCCCTTCTCCCTCTCCAGCCTCGGGGCTGTCCGCGGGG
GGACGGCTGCCTTCGGGGGGGACGGGGCAGGGCGGGGTTCGGCTTCT
GGCGTGTGACCGGCGGCTCTAGAGCCTCTGCTAACCATGTTCATGCC
TTCTTCTTTTTCCTACAGCTCCTGGGCAACGTGCTGGTTATTGTGAC
CGGTCGCTAGCCACCATGGTGAGCAAGGGCGAGGAGCTGTTCACCGG
GGTGGTGCCCATCCTGGTCGAGCTGGACGGCGACGTAAACGGCCACA
AGTTCAGCGTGTCCGGCGAGGGCGAGGGCGATGCCACCTACGGCAAG
CTGACCCTGAAGTTCATCTGCACCACCGGCAAGCTGCCCGTGCCCTG
GCCCACCCTCGTGACCACCCTGACCTACGGCGTGCAGTGCTTCAGCC
GCTACCCCGACCACATGAAGCAGCACGACTTCTTCAAGTCCGCCATG
CCCGAAGGCTACGTCCAGGAGCGCACCATCTTCTTCAAGGACGACGG
CAACTACAAGACCCGCGCCGAGGTGAAGTTCGAGGGCGACACCCTGG
TGAACCGCATCGAGCTGAAGGGCATCGACTTCAAGGAGGACGGCAAC
ATCCTGGGGCACAAGCTGGAGTACAACTACAACAGCCACAACGTCTA
TATCATGGCCGACAAGCAGAAGAACGGCATCAAGGTGAACTTCAAGA
TCCGCCACAACATCGAGGACGGCAGCGTGCAGCTCGCCGACCACTAC
CAGCAGAACACCCCCATCGGCGACGGCCCCGTGCTGCTGCCCGACAA
CCACTACCTGAGCACCCAGTCCGCCCTGAGCAAAGACCCCAACGAGA
AGCGCGATCACATGGTCCTGCTGGAGTTCGTGACCGCCGCCGGGATC
ACTCTCGGCATGGACGAGCTGTACAAGTAAcctgcaggcgccggcgt
cctctgagtgctgaaggcttgctgtaggctgtatgctgTTGAGAATC
CTGATGGAGCgggtttttgcctccaactgacccGCTCATAGGATTCT
CAAcagtgtatgatgcctgttactagcattcacatggaGAGCTCGCT
GATCAGCCTCGACTGTGCCTTCTAGTTGCCAGCCATCTGTTGTTTGC
CCCTCCCCCGTGCCTTCCTTGACCCTGGAAGGTGCCACTCCCACTGT
CCTTTCCTAATAAAATGAGGAAATTGCATCGCATTGTCTGAGTAGGT
GTCATTCTATTCTGGGGGGTGGGGTGGGGCAGGACAGCAAGGGGGAG
GATTGGGAAGACAATAGCAGGCATGCTGGGGATGCGGTGGGCTCTAT
GGAAGCTTGAATTCAGCTGACGTGCCTCGGACCGCTAGGAACCCCTA
GTGATGGAGTTGGCCACTCCCTCTCTGCGCGCTCGCTCGCTCACTGA
GGCCGGGCGACCAAAGGTCGCCCGACGCCCGGGCTTTGCCCGGGCGG
CCTCAGTGAGCGAGCGAGCGCGCAG
Exemplary pITR.CAG.miR2-155_EGFP
sequence
(SEQ ID NO: 205)
CTGCGCGCTCGCTCGCTCACTGAGGCCGCCCGGGCGTCGGGCGACCT
TTGGTCGCCCGGCCTCAGTGAGCGAGCGAGCGCGCAGAGAGGGAGTG
GCCAACTCCATCACTAGGGGTTCCTGCGGCCGCACGCGTGACATTGA
TTATTGACTAGTTATTAATAGTAATCAATTACGGGGTCATTAGTTCA
TAGCCCATATATGGAGTTCCGCGTTACATAACTTACGGTAAATGGCC
CGCCTGGCTGACCGCCCAACGACCCCCGCCCATTGACGTCAATAATG
ACGTATGTTCCCATAGTAACGCCAATAGGGACTTTCCATTGACGTCA
ATGGGTGGACTATTTACGGTAAACTGCCCACTTGGCAGTACATCAAG
TGTATCATATGCCAAGTACGCCCCCTATTGACGTCAATGACGGTAAA
TGGCCCGCCTGGCATTATGCCCAGTACATGACCTTATGGGACTTTCC
TACTTGGCAGTACATCTACGTATTAGTCATCGCTATTACCATGGGTC
GAGGTGAGCCCCACGTTCTGCTTCACTCTCCCCATCTCCCCCCCCTC
CCCACCCCCAATTTTGTATTTATTTATTTTTTAATTATTTTGTGCAG
CGATGGGGGCGGGGGGGGGGGGGGCGCGCGCCAGGCGGGGCGGGGCG
GGGCGAGGGGCGGGGCGGGGCGAGGCGGAGAGGTGCGGCGGCAGCCA
ATCAGAGCGGCGCGCTCCGAAAGTTTCCTTTTATGGCGAGGCGGCGG
CGGCGGCGGCCCTATAAAAAGCGAAGCGCGCGGCGGGCGGGAGTCGC
TGCGTTGCCTTCGCCCCGTGCCCCGCTCCGCGCCGCCTCGCGCCGCC
CGCCCCGGCTCTGACTGACCGCGTTACTCCCACAGGTGAGCGGGCGG
GACGGCCCTTCTCCTCCGGGCTGTAATTAGCGCTTGGTTTAATGACG
GCTCGTTTCTTTTCTGTGGCTGCGTGAAAGCCTTAAAGGGCTCCGGG
AGGGCCCTTTGTGCGGGGGGGAGCGGCTCGGGGGGTGCGTGCGTGTG
TGTGTGCGTGGGGAGCGCCGCGTGCGGCCCGCGCTGCCCGGCGGCTG
TGAGCGCTGCGGGCGCGGCGCGGGGCTTTGTGCGCTCCGCGTGTGCG
CGAGGGGAGCGCGGCCGGGGGCGGTGCCCCGCGGTGCGGGGGGGCTG
CGAGGGGAACAAAGGCTGCGTGCGGGGTGTGTGCGTGGGGGGGTGAG
CAGGGGGTGTGGGCGCGGCGGTCGGGCTGTAACCCCCCCCTGCACCC
CCCTCCCCGAGTTGCTGAGCACGGCCCGGCTTCGGGTGCGGGGCTCC
GTGCGGGGCGTGGCGCGGGGCTCGCCGTGCCGGGCGGGGGGTGGCGG
CAGGTGGGGGTGCCGGGCGGGGCGGGGCCGCCTCGGGCCGGGGAGGG
CTCGGGGGAGGGGCGCGGCGGCCCCCGGAGCGCCGGCGtcctctgag
tgctgaaggcttgctgtaggctgtatgctgTTGAGTCTCAGAGATGC
CCgggtttttgcctccaactgaCTCGGGATTCTGAGACTCAAcagtg
tatgatgcctgttactagcattcacatggaTCTAGAGCCTCTGCTAA
CCATGTTCATGCCTTCTTCTTTTTCCTACAGCTCCTGGGCAACGTGC
TGGTTATTGTGACCGGTCGCTAGCCACCATGGTGAGCAAGGGCGAGG
AGCTGTTCACCGGGGTGGTGCCCATCCTGGTCGAGCTGGACGGCGAC
GTAAACGGCCACAAGTTCAGCGTGTCCGGCGAGGGCGAGGGCGATGC
CACCTACGGCAAGCTGACCCTGAAGTTCATCTGCACCACCGGCAAGC
TGCCCGTGCCCTGGCCCACCCTCGTGACCACCCTGACCTACGGCGTG
CAGTGCTTCAGCCGCTACCCCGACCACATGAAGCAGCACGACTTCTT
CAAGTCCGCCATGCCCGAAGGCTACGTCCAGGAGCGCACCATCTTCT
TCAAGGACGACGGCAACTACAAGACCCGCGCCGAGGTGAAGTTCGAG
GGCGACACCCTGGTGAACCGCATCGAGCTGAAGGGCATCGACTTCAA
GGAGGACGGCAACATCCTGGGGCACAAGCTGGAGTACAACTACAACA
GCCACAACGTCTATATCATGGCCGACAAGCAGAAGAACGGCATCAAG
GTGAACTTCAAGATCCGCCACAACATCGAGGACGGCAGCGTGCAGCT
CGCCGACCACTACCAGCAGAACACCCCCATCGGCGACGGCCCCGTGC
TGCTGCCCGACAACCACTACCTGAGCACCCAGTCCGCCCTGAGCAAA
GACCCCAACGAGAAGCGCGATCACATGGTCCTGCTGGAGTTCGTGAC
CGCCGCCGGGATCACTCTCGGCATGGACGAGCTGTACAAGTAAcctg
caggcgccggcgtcctctgagtgctgaaggcttgctgtaggctgtat
gctgTTGAGTCTCAGAGATGCCCgggtttttgcctccaactgaCTCG
GGATTCTGAGACTCAAcagtgtatgatgcctgttactagcattcaca
tggaGAGCTCGCTGATCAGCCTCGACTGTGCCTTCTAGTTGCCAGCC
ATCTGTTGTTTGCCCCTCCCCCGTGCCTTCCTTGACCCTGGAAGGTG
CCACTCCCACTGTCCTTTCCTAATAAAATGAGGAAATTGCATCGCAT
TGTCTGAGTAGGTGTCATTCTATTCTGGGGGGTGGGGTGGGGCAGGA
CAGCAAGGGGGAGGATTGGGAAGACAATAGCAGGCATGCTGGGGATG
CGGTGGGCTCTATGGAAGCTTGAATTCAGCTGACGTGCCTCGGACCG
CTAGGAACCCCTAGTGATGGAGTTGGCCACTCCCTCTCTGCGCGCTC
GCTCGCTCACTGAGGCCGGGCGACCAAAGGTCGCCCGACGCCCGGGC
TTTGCCCGGGCGGCCTCAGTGAGCGAGCGAGCGCGCAG
Exemplary pITR.CAG.miR2v2-155_EGFP
sequence
(SEQ ID NO: 206)
CTGCGCGCTCGCTCGCTCACTGAGGCCGCCCGGGCGTCGGGCGACCT
TTGGTCGCCCGGCCTCAGTGAGCGAGCGAGCGCGCAGAGAGGGAGTG
GCCAACTCCATCACTAGGGGTTCCTGCGGCCGCACGCGTGACATTGA
TTATTGACTAGTTATTAATAGTAATCAATTACGGGGTCATTAGTTCA
TAGCCCATATATGGAGTTCCGCGTTACATAACTTACGGTAAATGGCC
CGCCTGGCTGACCGCCCAACGACCCCCGCCCATTGACGTCAATAATG
ACGTATGTTCCCATAGTAACGCCAATAGGGACTTTCCATTGACGTCA
ATGGGTGGACTATTTACGGTAAACTGCCCACTTGGCAGTACATCAAG
TGTATCATATGCCAAGTACGCCCCCTATTGACGTCAATGACGGTAAA
TGGCCCGCCTGGCATTATGCCCAGTACATGACCTTATGGGACTTTCC
TACTTGGCAGTACATCTACGTATTAGTCATCGCTATTACCATGGGTC
GAGGTGAGCCCCACGTTCTGCTTCACTCTCCCCATCTCCCCCCCCTC
CCCACCCCCAATTTTGTATTTATTTATTTTTTAATTATTTTGTGCAG
CGATGGGGGCGGGGGGGGGGGGGGCGCGCGCCAGGCGGGGCGGGGCG
GGGCGAGGGGCGGGGCGGGGCGAGGCGGAGAGGTGCGGCGGCAGCCA
ATCAGAGCGGCGCGCTCCGAAAGTTTCCTTTTATGGCGAGGCGGCGG
CGGCGGCGGCCCTATAAAAAGCGAAGCGCGCGGCGGGCGGGAGTCGC
TGCGTTGCCTTCGCCCCGTGCCCCGCTCCGCGCCGCCTCGCGCCGCC
CGCCCCGGCTCTGACTGACCGCGTTACTCCCACAGGTGAGCGGGCGG
GACGGCCCTTCTCCTCCGGGCTGTAATTAGCGCTTGGTTTAATGACG
GCTCGTTTCTTTTCTGTGGCTGCGTGAAAGCCTTAAAGGGCTCCGGG
AGGGCCCTTTGTGCGGGGGGGAGCGGCTCGGGGGGTGCGTGCGTGTG
TGTGTGCGTGGGGAGCGCCGCGTGCGGCCCGCGCTGCCCGGCGGCTG
TGAGCGCTGCGGGCGCGGCGCGGGGCTTTGTGCGCTCCGCGTGTGCG
CGAGGGGAGCGCGGCCGGGGGCGGTGCCCCGCGGTGCGGGGGGGCTG
CGAGGGGAACAAAGGCTGCGTGCGGGGTGTGTGCGTGGGGGGGTGAG
CAGGGGGTGTGGGCGCGGCGGTCGGGCTGTAACCCCCCCCTGCACCC
CCCTCCCCGAGTTGCTGAGCACGGCCCGGCTTCGGGTGCGGGGCTCC
GTGCGGGGCGTGGCGCGGGGCTCGCCGTGCCGGGCGGGGGGTGGCGG
CAGGTGGGGGTGCCGGGCGGGGCGGGGCCGCCTCGGGCCGGGGAGGG
CTCGGGGGAGGGGCGCGGCGGCCCCCGGAGCGCCGGCGtcctctgag
tgctgaaggcttgctgtaggctgtatgctgTTGAGTCTCAGAGATGC
CCgggtttttgcctccaactgaCTCGGGATTCTGAGATTCAAcagtg
tatgatgcctgttactagcattcacatggaTCTAGAGCCTCTGCTAA
CCATGTTCATGCCTTCTTCTTTTTCCTACAGCTCCTGGGCAACGTGC
TGGTTATTGTGACCGGTCGCTAGCCACCATGGTGAGCAAGGGCGAGG
AGCTGTTCACCGGGGTGGTGCCCATCCTGGTCGAGCTGGACGGCGAC
GTAAACGGCCACAAGTTCAGCGTGTCCGGCGAGGGCGAGGGCGATGC
CACCTACGGCAAGCTGACCCTGAAGTTCATCTGCACCACCGGCAAGC
TGCCCGTGCCCTGGCCCACCCTCGTGACCACCCTGACCTACGGCGTG
CAGTGCTTCAGCCGCTACCCCGACCACATGAAGCAGCACGACTTCTT
CAAGTCCGCCATGCCCGAAGGCTACGTCCAGGAGCGCACCATCTTCT
TCAAGGACGACGGCAACTACAAGACCCGCGCCGAGGTGAAGTTCGAG
GGCGACACCCTGGTGAACCGCATCGAGCTGAAGGGCATCGACTTCAA
GGAGGACGGCAACATCCTGGGGCACAAGCTGGAGTACAACTACAACA
GCCACAACGTCTATATCATGGCCGACAAGCAGAAGAACGGCATCAAG
GTGAACTTCAAGATCCGCCACAACATCGAGGACGGCAGCGTGCAGCT
CGCCGACCACTACCAGCAGAACACCCCCATCGGCGACGGCCCCGTGC
TGCTGCCCGACAACCACTACCTGAGCACCCAGTCCGCCCTGAGCAAA
GACCCCAACGAGAAGCGCGATCACATGGTCCTGCTGGAGTTCGTGAC
CGCCGCCGGGATCACTCTCGGCATGGACGAGCTGTACAAGTAAcctg
caggcgccggcgtcctctgagtgctgaaggcttgctgtaggctgtat
gctgTTGAGTCTCAGAGATGCCCgggtttttgcctccaactgaCTCG
GGATTCTGAGATTCAAcagtgtatgatgcctgttactagcattcaca
tggaGAGCTCGCTGATCAGCCTCGACTGTGCCTTCTAGTTGCCAGCC
ATCTGTTGTTTGCCCCTCCCCCGTGCCTTCCTTGACCCTGGAAGGTG
CCACTCCCACTGTCCTTTCCTAATAAAATGAGGAAATTGCATCGCAT
TGTCTGAGTAGGTGTCATTCTATTCTGGGGGGTGGGGTGGGGCAGGA
CAGCAAGGGGGAGGATTGGGAAGACAATAGCAGGCATGCTGGGGATG
CGGTGGGCTCTATGGAAGCTTGAATTCAGCTGACGTGCCTCGGACCG
CTAGGAACCCCTAGTGATGGAGTTGGCCACTCCCTCTCTGCGCGCTC
GCTCGCTCACTGAGGCCGGGCGACCAAAGGTCGCCCGACGCCCGGGC
TTTGCCCGGGCGGCCTCAGTGAGCGAGCGAGCGCGCAG
Exemplary pITR.CAG.miR2v3-155_EGFP
sequence
(SEQ ID NO: 207)
CTGCGCGCTCGCTCGCTCACTGAGGCCGCCCGGGCGTCGGGCGACCT
TTGGTCGCCCGGCCTCAGTGAGCGAGCGAGCGCGCAGAGAGGGAGTG
GCCAACTCCATCACTAGGGGTTCCTGCGGCCGCACGCGTGACATTGA
TTATTGACTAGTTATTAATAGTAATCAATTACGGGGTCATTAGTTCA
TAGCCCATATATGGAGTTCCGCGTTACATAACTTACGGTAAATGGCC
CGCCTGGCTGACCGCCCAACGACCCCCGCCCATTGACGTCAATAATG
ACGTATGTTCCCATAGTAACGCCAATAGGGACTTTCCATTGACGTCA
ATGGGTGGACTATTTACGGTAAACTGCCCACTTGGCAGTACATCAAG
TGTATCATATGCCAAGTACGCCCCCTATTGACGTCAATGACGGTAAA
TGGCCCGCCTGGCATTATGCCCAGTACATGACCTTATGGGACTTTCC
TACTTGGCAGTACATCTACGTATTAGTCATCGCTATTACCATGGGTC
GAGGTGAGCCCCACGTTCTGCTTCACTCTCCCCATCTCCCCCCCCTC
CCCACCCCCAATTTTGTATTTATTTATTTTTTAATTATTTTGTGCAG
CGATGGGGGCGGGGGGGGGGGGGGCGCGCGCCAGGCGGGGCGGGGCG
GGGCGAGGGGCGGGGCGGGGCGAGGCGGAGAGGTGCGGCGGCAGCCA
ATCAGAGCGGCGCGCTCCGAAAGTTTCCTTTTATGGCGAGGCGGCGG
CGGCGGCGGCCCTATAAAAAGCGAAGCGCGCGGCGGGCGGGAGTCGC
TGCGTTGCCTTCGCCCCGTGCCCCGCTCCGCGCCGCCTCGCGCCGCC
CGCCCCGGCTCTGACTGACCGCGTTACTCCCACAGGTGAGCGGGCGG
GACGGCCCTTCTCCTCCGGGCTGTAATTAGCGCTTGGTTTAATGACG
GCTCGTTTCTTTTCTGTGGCTGCGTGAAAGCCTTAAAGGGCTCCGGG
AGGGCCCTTTGTGCGGGGGGGAGCGGCTCGGGGGGTGCGTGCGTGTG
TGTGTGCGTGGGGAGCGCCGCGTGCGGCCCGCGCTGCCCGGCGGCTG
TGAGCGCTGCGGGCGCGGCGCGGGGCTTTGTGCGCTCCGCGTGTGCG
CGAGGGGAGCGCGGCCGGGGGCGGTGCCCCGCGGTGCGGGGGGGCTG
CGAGGGGAACAAAGGCTGCGTGCGGGGTGTGTGCGTGGGGGGGTGAG
CAGGGGGTGTGGGCGCGGCGGTCGGGCTGTAACCCCCCCCTGCACCC
CCCTCCCCGAGTTGCTGAGCACGGCCCGGCTTCGGGTGCGGGGCTCC
GTGCGGGGCGTGGCGCGGGGCTCGCCGTGCCGGGCGGGGGGTGGCGG
CAGGTGGGGGTGCCGGGCGGGGCGGGGCCGCCTCGGGCCGGGGAGGG
CTCGGGGGAGGGGCGCGGCGGCCCCCGGAGCGCCGGCGtcctctgag
tgctgaaggcttgctgtaggctgtatgctgTTGAGTCTCAGAGATGC
CCgggtttttgcctccaactgaCTCGGGATCCTGAGATTCAAcagtg
tatgatgcctgttactagcattcacatggaTCTAGAGCCTCTGCTAA
CCATGTTCATGCCTTCTTCTTTTTCCTACAGCTCCTGGGCAACGTGC
TGGTTATTGTGACCGGTCGCTAGCCACCATGGTGAGCAAGGGCGAGG
AGCTGTTCACCGGGGTGGTGCCCATCCTGGTCGAGCTGGACGGCGAC
GTAAACGGCCACAAGTTCAGCGTGTCCGGCGAGGGCGAGGGCGATGC
CACCTACGGCAAGCTGACCCTGAAGTTCATCTGCACCACCGGCAAGC
TGCCCGTGCCCTGGCCCACCCTCGTGACCACCCTGACCTACGGCGTG
CAGTGCTTCAGCCGCTACCCCGACCACATGAAGCAGCACGACTTCTT
CAAGTCCGCCATGCCCGAAGGCTACGTCCAGGAGCGCACCATCTTCT
TCAAGGACGACGGCAACTACAAGACCCGCGCCGAGGTGAAGTTCGAG
GGCGACACCCTGGTGAACCGCATCGAGCTGAAGGGCATCGACTTCAA
GGAGGACGGCAACATCCTGGGGCACAAGCTGGAGTACAACTACAACA
GCCACAACGTCTATATCATGGCCGACAAGCAGAAGAACGGCATCAAG
GTGAACTTCAAGATCCGCCACAACATCGAGGACGGCAGCGTGCAGCT
CGCCGACCACTACCAGCAGAACACCCCCATCGGCGACGGCCCCGTGC
TGCTGCCCGACAACCACTACCTGAGCACCCAGTCCGCCCTGAGCAAA
GACCCCAACGAGAAGCGCGATCACATGGTCCTGCTGGAGTTCGTGAC
CGCCGCCGGGATCACTCTCGGCATGGACGAGCTGTACAAGTAAcctg
caggcgccggcgtcctctgagtgctgaaggcttgctgtaggctgtat
gctgTTGAGTCTCAGAGATGCCCgggtttttgcctccaactgaCTCG
GGATCCTGAGATTCAAcagtgtatgatgcctgttactagcattcaca
tggaGAGCTCGCTGATCAGCCTCGACTGTGCCTTCTAGTTGCCAGCC
ATCTGTTGTTTGCCCCTCCCCCGTGCCTTCCTTGACCCTGGAAGGTG
CCACTCCCACTGTCCTTTCCTAATAAAATGAGGAAATTGCATCGCAT
TGTCTGAGTAGGTGTCATTCTATTCTGGGGGGTGGGGTGGGGCAGGA
CAGCAAGGGGGAGGATTGGGAAGACAATAGCAGGCATGCTGGGGATG
CGGTGGGCTCTATGGAAGCTTGAATTCAGCTGACGTGCCTCGGACCG
CTAGGAACCCCTAGTGATGGAGTTGGCCACTCCCTCTCTGCGCGCTC
GCTCGCTCACTGAGGCCGGGCGACCAAAGGTCGCCCGACGCCCGGGC
TTTGCCCGGGCGGCCTCAGTGAGCGAGCGAGCGCGCAG
Exemplary pITR.CAG.miR2v4-155_EGFP
sequence
(SEQ ID NO: 208)
CTGCGCGCTCGCTCGCTCACTGAGGCCGCCCGGGCGTCGGGCGACCT
TTGGTCGCCCGGCCTCAGTGAGCGAGCGAGCGCGCAGAGAGGGAGTG
GCCAACTCCATCACTAGGGGTTCCTGCGGCCGCACGCGTGACATTGA
TTATTGACTAGTTATTAATAGTAATCAATTACGGGGTCATTAGTTCA
TAGCCCATATATGGAGTTCCGCGTTACATAACTTACGGTAAATGGCC
CGCCTGGCTGACCGCCCAACGACCCCCGCCCATTGACGTCAATAATG
ACGTATGTTCCCATAGTAACGCCAATAGGGACTTTCCATTGACGTCA
ATGGGTGGACTATTTACGGTAAACTGCCCACTTGGCAGTACATCAAG
TGTATCATATGCCAAGTACGCCCCCTATTGACGTCAATGACGGTAAA
TGGCCCGCCTGGCATTATGCCCAGTACATGACCTTATGGGACTTTCC
TACTTGGCAGTACATCTACGTATTAGTCATCGCTATTACCATGGGTC
GAGGTGAGCCCCACGTTCTGCTTCACTCTCCCCATCTCCCCCCCCTC
CCCACCCCCAATTTTGTATTTATTTATTTTTTAATTATTTTGTGCAG
CGATGGGGGCGGGGGGGGGGGGGGCGCGCGCCAGGCGGGGCGGGGCG
GGGCGAGGGGCGGGGCGGGGCGAGGCGGAGAGGTGCGGCGGCAGCCA
ATCAGAGCGGCGCGCTCCGAAAGTTTCCTTTTATGGCGAGGCGGCGG
CGGCGGCGGCCCTATAAAAAGCGAAGCGCGCGGCGGGCGGGAGTCGC
TGCGTTGCCTTCGCCCCGTGCCCCGCTCCGCGCCGCCTCGCGCCGCC
CGCCCCGGCTCTGACTGACCGCGTTACTCCCACAGGTGAGCGGGCGG
GACGGCCCTTCTCCTCCGGGCTGTAATTAGCGCTTGGTTTAATGACG
GCTCGTTTCTTTTCTGTGGCTGCGTGAAAGCCTTAAAGGGCTCCGGG
AGGGCCCTTTGTGCGGGGGGGAGCGGCTCGGGGGGTGCGTGCGTGTG
TGTGTGCGTGGGGAGCGCCGCGTGCGGCCCGCGCTGCCCGGCGGCTG
TGAGCGCTGCGGGCGCGGCGCGGGGCTTTGTGCGCTCCGCGTGTGCG
CGAGGGGAGCGCGGCCGGGGGCGGTGCCCCGCGGTGCGGGGGGGCTG
CGAGGGGAACAAAGGCTGCGTGCGGGGTGTGTGCGTGGGGGGGTGAG
CAGGGGGTGTGGGCGCGGCGGTCGGGCTGTAACCCCCCCCTGCACCC
CCCTCCCCGAGTTGCTGAGCACGGCCCGGCTTCGGGTGCGGGGCTCC
GTGCGGGGCGTGGCGCGGGGCTCGCCGTGCCGGGCGGGGGGTGGCGG
CAGGTGGGGGTGCCGGGCGGGGCGGGGCCGCCTCGGGCCGGGGAGGG
CTCGGGGGAGGGGCGCGGCGGCCCCCGGAGCGCCGGCGtcctctgag
tgctgaaggcttgctgtaggctgtatgctgTTGAGTCTCAGAGATGC
CCggaagtttgcctccaactctTTCGGGATCCTGAGATTCAAcagtg
tatgatgcctgttactagcattcacatggaTCTAGAGCCTCTGCTAA
CCATGTTCATGCCTTCTTCTTTTTCCTACAGCTCCTGGGCAACGTGC
TGGTTATTGTGACCGGTCGCTAGCCACCATGGTGAGCAAGGGCGAGG
AGCTGTTCACCGGGGTGGTGCCCATCCTGGTCGAGCTGGACGGCGAC
GTAAACGGCCACAAGTTCAGCGTGTCCGGCGAGGGCGAGGGCGATGC
CACCTACGGCAAGCTGACCCTGAAGTTCATCTGCACCACCGGCAAGC
TGCCCGTGCCCTGGCCCACCCTCGTGACCACCCTGACCTACGGCGTG
CAGTGCTTCAGCCGCTACCCCGACCACATGAAGCAGCACGACTTCTT
CAAGTCCGCCATGCCCGAAGGCTACGTCCAGGAGCGCACCATCTTCT
TCAAGGACGACGGCAACTACAAGACCCGCGCCGAGGTGAAGTTCGAG
GGCGACACCCTGGTGAACCGCATCGAGCTGAAGGGCATCGACTTCAA
GGAGGACGGCAACATCCTGGGGCACAAGCTGGAGTACAACTACAACA
GCCACAACGTCTATATCATGGCCGACAAGCAGAAGAACGGCATCAAG
GTGAACTTCAAGATCCGCCACAACATCGAGGACGGCAGCGTGCAGCT
CGCCGACCACTACCAGCAGAACACCCCCATCGGCGACGGCCCCGTGC
TGCTGCCCGACAACCACTACCTGAGCACCCAGTCCGCCCTGAGCAAA
GACCCCAACGAGAAGCGCGATCACATGGTCCTGCTGGAGTTCGTGAC
CGCCGCCGGGATCACTCTCGGCATGGACGAGCTGTACAAGTAAcctg
caggcgccggcgtcctctgagtgctgaaggcttgctgtaggctgtat
gctgTTGAGTCTCAGAGATGCCCggaagtttgcctccaactctTTCG
GGATCCTGAGATTCAAcagtgtatgatgcctgttactagcattcaca
tggaGAGCTCGCTGATCAGCCTCGACTGTGCCTTCTAGTTGCCAGCC
ATCTGTTGTTTGCCCCTCCCCCGTGCCTTCCTTGACCCTGGAAGGTG
CCACTCCCACTGTCCTTTCCTAATAAAATGAGGAAATTGCATCGCAT
TGTCTGAGTAGGTGTCATTCTATTCTGGGGGGTGGGGTGGGGCAGGA
CAGCAAGGGGGAGGATTGGGAAGACAATAGCAGGCATGCTGGGGATG
CGGTGGGCTCTATGGAAGCTTGAATTCAGCTGACGTGCCTCGGACCG
CTAGGAACCCCTAGTGATGGAGTTGGCCACTCCCTCTCTGCGCGCTC
GCTCGCTCACTGAGGCCGGGCGACCAAAGGTCGCCCGACGCCCGGGC
TTTGCCCGGGCGGCCTCAGTGAGCGAGCGAGCGCGCAG
Exemplary pITR.CAG.miR4-155_EGFP
sequence
(SEQ ID NO: 209)
CTGCGCGCTCGCTCGCTCACTGAGGCCGCCCGGGCGTCGGGCGACCT
TTGGTCGCCCGGCCTCAGTGAGCGAGCGAGCGCGCAGAGAGGGAGTG
GCCAACTCCATCACTAGGGGTTCCTGCGGCCGCACGCGTGACATTGA
TTATTGACTAGTTATTAATAGTAATCAATTACGGGGTCATTAGTTCA
TAGCCCATATATGGAGTTCCGCGTTACATAACTTACGGTAAATGGCC
CGCCTGGCTGACCGCCCAACGACCCCCGCCCATTGACGTCAATAATG
ACGTATGTTCCCATAGTAACGCCAATAGGGACTTTCCATTGACGTCA
ATGGGTGGACTATTTACGGTAAACTGCCCACTTGGCAGTACATCAAG
TGTATCATATGCCAAGTACGCCCCCTATTGACGTCAATGACGGTAAA
TGGCCCGCCTGGCATTATGCCCAGTACATGACCTTATGGGACTTTCC
TACTTGGCAGTACATCTACGTATTAGTCATCGCTATTACCATGGGTC
GAGGTGAGCCCCACGTTCTGCTTCACTCTCCCCATCTCCCCCCCCTC
CCCACCCCCAATTTTGTATTTATTTATTTTTTAATTATTTTGTGCAG
CGATGGGGGCGGGGGGGGGGGGGGCGCGCGCCAGGCGGGGCGGGGCG
GGGCGAGGGGCGGGGCGGGGCGAGGCGGAGAGGTGCGGCGGCAGCCA
ATCAGAGCGGCGCGCTCCGAAAGTTTCCTTTTATGGCGAGGCGGCGG
CGGCGGCGGCCCTATAAAAAGCGAAGCGCGCGGCGGGCGGGAGTCGC
TGCGTTGCCTTCGCCCCGTGCCCCGCTCCGCGCCGCCTCGCGCCGCC
CGCCCCGGCTCTGACTGACCGCGTTACTCCCACAGGTGAGCGGGCGG
GACGGCCCTTCTCCTCCGGGCTGTAATTAGCGCTTGGTTTAATGACG
GCTCGTTTCTTTTCTGTGGCTGCGTGAAAGCCTTAAAGGGCTCCGGG
AGGGCCCTTTGTGCGGGGGGGAGCGGCTCGGGGGGTGCGTGCGTGTG
TGTGTGCGTGGGGAGCGCCGCGTGCGGCCCGCGCTGCCCGGCGGCTG
TGAGCGCTGCGGGCGCGGCGCGGGGCTTTGTGCGCTCCGCGTGTGCG
CGAGGGGAGCGCGGCCGGGGGCGGTGCCCCGCGGTGCGGGGGGGCTG
CGAGGGGAACAAAGGCTGCGTGCGGGGTGTGTGCGTGGGGGGGTGAG
CAGGGGGTGTGGGCGCGGCGGTCGGGCTGTAACCCCCCCCTGCACCC
CCCTCCCCGAGTTGCTGAGCACGGCCCGGCTTCGGGTGCGGGGCTCC
GTGCGGGGCGTGGCGCGGGGCTCGCCGTGCCGGGCGGGGGGTGGCGG
CAGGTGGGGGTGCCGGGCGGGGCGGGGCCGCCTCGGGCCGGGGAGGG
CTCGGGGGAGGGGCGCGGCGGCCCCCGGAGCGCCGGCGtcctctgag
tgctgaaggcttgctgtaggctgtatgctgTTCTCGAAGTGCTTCTG
CCgggtttttgcctccaactgacTcGGCGAATACTTCGAGAAcagtg
tatgatgcctgttactagcattcacatggaTCTAGAGCCTCTGCTAA
CCATGTTCATGCCTTCTTCTTTTTCCTACAGCTCCTGGGCAACGTGC
TGGTTATTGTGACCGGTCGCTAGCCACCATGGTGAGCAAGGGCGAGG
AGCTGTTCACCGGGGTGGTGCCCATCCTGGTCGAGCTGGACGGCGAC
GTAAACGGCCACAAGTTCAGCGTGTCCGGCGAGGGCGAGGGCGATGC
CACCTACGGCAAGCTGACCCTGAAGTTCATCTGCACCACCGGCAAGC
TGCCCGTGCCCTGGCCCACCCTCGTGACCACCCTGACCTACGGCGTG
CAGTGCTTCAGCCGCTACCCCGACCACATGAAGCAGCACGACTTCTT
CAAGTCCGCCATGCCCGAAGGCTACGTCCAGGAGCGCACCATCTTCT
TCAAGGACGACGGCAACTACAAGACCCGCGCCGAGGTGAAGTTCGAG
GGCGACACCCTGGTGAACCGCATCGAGCTGAAGGGCATCGACTTCAA
GGAGGACGGCAACATCCTGGGGCACAAGCTGGAGTACAACTACAACA
GCCACAACGTCTATATCATGGCCGACAAGCAGAAGAACGGCATCAAG
GTGAACTTCAAGATCCGCCACAACATCGAGGACGGCAGCGTGCAGCT
CGCCGACCACTACCAGCAGAACACCCCCATCGGCGACGGCCCCGTGC
TGCTGCCCGACAACCACTACCTGAGCACCCAGTCCGCCCTGAGCAAA
GACCCCAACGAGAAGCGCGATCACATGGTCCTGCTGGAGTTCGTGAC
CGCCGCCGGGATCACTCTCGGCATGGACGAGCTGTACAAGTAAcctg
caggcgccggcgtcctctgagtgctgaaggcttgctgtaggctgtat
gctgTTCTCGAAGTGCTTCTGCCgggtttttgcctccaactgacTcG
GCGAATACTTCGAGAAcagtgtatgatgcctgttactagcattcaca
tggaGAGCTCGCTGATCAGCCTCGACTGTGCCTTCTAGTTGCCAGCC
ATCTGTTGTTTGCCCCTCCCCCGTGCCTTCCTTGACCCTGGAAGGTG
CCACTCCCACTGTCCTTTCCTAATAAAATGAGGAAATTGCATCGCAT
TGTCTGAGTAGGTGTCATTCTATTCTGGGGGGTGGGGTGGGGCAGGA
CAGCAAGGGGGAGGATTGGGAAGACAATAGCAGGCATGCTGGGGATG
CGGTGGGCTCTATGGAAGCTTGAATTCAGCTGACGTGCCTCGGACCG
CTAGGAACCCCTAGTGATGGAGTTGGCCACTCCCTCTCTGCGCGCTC
GCTCGCTCACTGAGGCCGGGCGACCAAAGGTCGCCCGACGCCCGGGC
TTTGCCCGGGCGGCCTCAGTGAGCGAGCGAGCGCGCAG
Exemplary pITR.CAG.miR5-155_EGFP
sequence
(SEQ ID NO: 210)
CTGCGCGCTCGCTCGCTCACTGAGGCCGCCCGGGCGTCGGGCGACCT
TTGGTCGCCCGGCCTCAGTGAGCGAGCGAGCGCGCAGAGAGGGAGTG
GCCAACTCCATCACTAGGGGTTCCTGCGGCCGCACGCGTGACATTGA
TTATTGACTAGTTATTAATAGTAATCAATTACGGGGTCATTAGTTCA
TAGCCCATATATGGAGTTCCGCGTTACATAACTTACGGTAAATGGCC
CGCCTGGCTGACCGCCCAACGACCCCCGCCCATTGACGTCAATAATG
ACGTATGTTCCCATAGTAACGCCAATAGGGACTTTCCATTGACGTCA
ATGGGTGGACTATTTACGGTAAACTGCCCACTTGGCAGTACATCAAG
TGTATCATATGCCAAGTACGCCCCCTATTGACGTCAATGACGGTAAA
TGGCCCGCCTGGCATTATGCCCAGTACATGACCTTATGGGACTTTCC
TACTTGGCAGTACATCTACGTATTAGTCATCGCTATTACCATGGGTC
GAGGTGAGCCCCACGTTCTGCTTCACTCTCCCCATCTCCCCCCCCTC
CCCACCCCCAATTTTGTATTTATTTATTTTTTAATTATTTTGTGCAG
CGATGGGGGCGGGGGGGGGGGGGGCGCGCGCCAGGCGGGGCGGGGCG
GGGCGAGGGGCGGGGCGGGGCGAGGCGGAGAGGTGCGGCGGCAGCCA
ATCAGAGCGGCGCGCTCCGAAAGTTTCCTTTTATGGCGAGGCGGCGG
CGGCGGCGGCCCTATAAAAAGCGAAGCGCGCGGCGGGCGGGAGTCGC
TGCGTTGCCTTCGCCCCGTGCCCCGCTCCGCGCCGCCTCGCGCCGCC
CGCCCCGGCTCTGACTGACCGCGTTACTCCCACAGGTGAGCGGGCGG
GACGGCCCTTCTCCTCCGGGCTGTAATTAGCGCTTGGTTTAATGACG
GCTCGTTTCTTTTCTGTGGCTGCGTGAAAGCCTTAAAGGGCTCCGGG
AGGGCCCTTTGTGCGGGGGGGAGCGGCTCGGGGGGTGCGTGCGTGTG
TGTGTGCGTGGGGAGCGCCGCGTGCGGCCCGCGCTGCCCGGCGGCTG
TGAGCGCTGCGGGCGCGGCGCGGGGCTTTGTGCGCTCCGCGTGTGCG
CGAGGGGAGCGCGGCCGGGGGCGGTGCCCCGCGGTGCGGGGGGGCTG
CGAGGGGAACAAAGGCTGCGTGCGGGGTGTGTGCGTGGGGGGGTGAG
CAGGGGGTGTGGGCGCGGCGGTCGGGCTGTAACCCCCCCCTGCACCC
CCCTCCCCGAGTTGCTGAGCACGGCCCGGCTTCGGGTGCGGGGCTCC
GTGCGGGGCGTGGCGCGGGGCTCGCCGTGCCGGGCGGGGGGTGGCGG
CAGGTGGGGGTGCCGGGCGGGGCGGGGCCGCCTCGGGCCGGGGAGGG
CTCGGGGGAGGGGCGCGGCGGCCCCCGGAGCGCCGGCGtcctctgag
tgctgaaggcttgctgtaggctgtatgctgTTCTCCACCTTGACCAC
GCgtgtttttgcctccaactgacaTGTGGGTAAGGTGGAGAACAgtg
tatgatgcctgttactagcattcacatggaTCTAGAGCCTCTGCTAA
CCATGTTCATGCCTTCTTCTTTTTCCTACAGCTCCTGGGCAACGTGC
TGGTTATTGTGACCGGTCGCTAGCCACCATGGTGAGCAAGGGCGAGG
AGCTGTTCACCGGGGTGGTGCCCATCCTGGTCGAGCTGGACGGCGAC
GTAAACGGCCACAAGTTCAGCGTGTCCGGCGAGGGCGAGGGCGATGC
CACCTACGGCAAGCTGACCCTGAAGTTCATCTGCACCACCGGCAAGC
TGCCCGTGCCCTGGCCCACCCTCGTGACCACCCTGACCTACGGCGTG
CAGTGCTTCAGCCGCTACCCCGACCACATGAAGCAGCACGACTTCTT
CAAGTCCGCCATGCCCGAAGGCTACGTCCAGGAGCGCACCATCTTCT
TCAAGGACGACGGCAACTACAAGACCCGCGCCGAGGTGAAGTTCGAG
GGCGACACCCTGGTGAACCGCATCGAGCTGAAGGGCATCGACTTCAA
GGAGGACGGCAACATCCTGGGGCACAAGCTGGAGTACAACTACAACA
GCCACAACGTCTATATCATGGCCGACAAGCAGAAGAACGGCATCAAG
GTGAACTTCAAGATCCGCCACAACATCGAGGACGGCAGCGTGCAGCT
CGCCGACCACTACCAGCAGAACACCCCCATCGGCGACGGCCCCGTGC
TGCTGCCCGACAACCACTACCTGAGCACCCAGTCCGCCCTGAGCAAA
GACCCCAACGAGAAGCGCGATCACATGGTCCTGCTGGAGTTCGTGAC
CGCCGCCGGGATCACTCTCGGCATGGACGAGCTGTACAAGTAAcctg
caggcgccggcgtcctctgagtgctgaaggcttgctgtaggctgtat
gctgTTCTCCACCTTGACCACGCgtgtttttgcctccaactgacaTG
TGGGTAAGGTGGAGAACAgtgtatgatgcctgttactagcattcaca
tggaGAGCTCGCTGATCAGCCTCGACTGTGCCTTCTAGTTGCCAGCC
ATCTGTTGTTTGCCCCTCCCCCGTGCCTTCCTTGACCCTGGAAGGTG
CCACTCCCACTGTCCTTTCCTAATAAAATGAGGAAATTGCATCGCAT
TGTCTGAGTAGGTGTCATTCTATTCTGGGGGGTGGGGTGGGGCAGGA
CAGCAAGGGGGAGGATTGGGAAGACAATAGCAGGCATGCTGGGGATG
CGGTGGGCTCTATGGAAGCTTGAATTCAGCTGACGTGCCTCGGACCG
CTAGGAACCCCTAGTGATGGAGTTGGCCACTCCCTCTCTGCGCGCTC
GCTCGCTCACTGAGGCCGGGCGACCAAAGGTCGCCCGACGCCCGGGC
TTTGCCCGGGCGGCCTCAGTGAGCGAGCGAGCGCGCAG
Exemplary pITR.CAG.miR6-155_EGFP
sequence
(SEQ ID NO: 211)
CTGCGCGCTCGCTCGCTCACTGAGGCCGCCCGGGCGTCGGGCGACCT
TTGGTCGCCCGGCCTCAGTGAGCGAGCGAGCGCGCAGAGAGGGAGTG
GCCAACTCCATCACTAGGGGTTCCTGCGGCCGCACGCGTGACATTGA
TTATTGACTAGTTATTAATAGTAATCAATTACGGGGTCATTAGTTCA
TAGCCCATATATGGAGTTCCGCGTTACATAACTTACGGTAAATGGCC
CGCCTGGCTGACCGCCCAACGACCCCCGCCCATTGACGTCAATAATG
ACGTATGTTCCCATAGTAACGCCAATAGGGACTTTCCATTGACGTCA
ATGGGTGGACTATTTACGGTAAACTGCCCACTTGGCAGTACATCAAG
TGTATCATATGCCAAGTACGCCCCCTATTGACGTCAATGACGGTAAA
TGGCCCGCCTGGCATTATGCCCAGTACATGACCTTATGGGACTTTCC
TACTTGGCAGTACATCTACGTATTAGTCATCGCTATTACCATGGGTC
GAGGTGAGCCCCACGTTCTGCTTCACTCTCCCCATCTCCCCCCCCTC
CCCACCCCCAATTTTGTATTTATTTATTTTTTAATTATTTTGTGCAG
CGATGGGGGCGGGGGGGGGGGGGGCGCGCGCCAGGCGGGGCGGGGCG
GGGCGAGGGGCGGGGCGGGGCGAGGCGGAGAGGTGCGGCGGCAGCCA
ATCAGAGCGGCGCGCTCCGAAAGTTTCCTTTTATGGCGAGGCGGCGG
CGGCGGCGGCCCTATAAAAAGCGAAGCGCGCGGCGGGCGGGAGTCGC
TGCGTTGCCTTCGCCCCGTGCCCCGCTCCGCGCCGCCTCGCGCCGCC
CGCCCCGGCTCTGACTGACCGCGTTACTCCCACAGGTGAGCGGGCGG
GACGGCCCTTCTCCTCCGGGCTGTAATTAGCGCTTGGTTTAATGACG
GCTCGTTTCTTTTCTGTGGCTGCGTGAAAGCCTTAAAGGGCTCCGGG
AGGGCCCTTTGTGCGGGGGGGAGCGGCTCGGGGGGTGCGTGCGTGTG
TGTGTGCGTGGGGAGCGCCGCGTGCGGCCCGCGCTGCCCGGCGGCTG
TGAGCGCTGCGGGCGCGGCGCGGGGCTTTGTGCGCTCCGCGTGTGCG
CGAGGGGAGCGCGGCCGGGGGCGGTGCCCCGCGGTGCGGGGGGGCTG
CGAGGGGAACAAAGGCTGCGTGCGGGGTGTGTGCGTGGGGGGGTGAG
CAGGGGGTGTGGGCGCGGCGGTCGGGCTGTAACCCCCCCCTGCACCC
CCCTCCCCGAGTTGCTGAGCACGGCCCGGCTTCGGGTGCGGGGCTCC
GTGCGGGGCGTGGCGCGGGGCTCGCCGTGCCGGGCGGGGGGTGGCGG
CAGGTGGGGGTGCCGGGCGGGGCGGGGCCGCCTCGGGCCGGGGAGGG
CTCGGGGGAGGGGCGCGGCGGCCCCCGGAGCGCCGGCGtcctctgag
tgctgaaggcttgctgtaggctgtatgctgATACTGTCATAGTAGTA
CCaggtttttgcctccaactgacctGGTCTATATGACAGTATCAgtg
tatgatgcctgttactagcattcacatggaTCTAGAGCCTCTGCTAA
CCATGTTCATGCCTTCTTCTTTTTCCTACAGCTCCTGGGCAACGTGC
TGGTTATTGTGACCGGTCGCTAGCCACCATGGTGAGCAAGGGCGAGG
AGCTGTTCACCGGGGTGGTGCCCATCCTGGTCGAGCTGGACGGCGAC
GTAAACGGCCACAAGTTCAGCGTGTCCGGCGAGGGCGAGGGCGATGC
CACCTACGGCAAGCTGACCCTGAAGTTCATCTGCACCACCGGCAAGC
TGCCCGTGCCCTGGCCCACCCTCGTGACCACCCTGACCTACGGCGTG
CAGTGCTTCAGCCGCTACCCCGACCACATGAAGCAGCACGACTTCTT
CAAGTCCGCCATGCCCGAAGGCTACGTCCAGGAGCGCACCATCTTCT
TCAAGGACGACGGCAACTACAAGACCCGCGCCGAGGTGAAGTTCGAG
GGCGACACCCTGGTGAACCGCATCGAGCTGAAGGGCATCGACTTCAA
GGAGGACGGCAACATCCTGGGGCACAAGCTGGAGTACAACTACAACA
GCCACAACGTCTATATCATGGCCGACAAGCAGAAGAACGGCATCAAG
GTGAACTTCAAGATCCGCCACAACATCGAGGACGGCAGCGTGCAGCT
CGCCGACCACTACCAGCAGAACACCCCCATCGGCGACGGCCCCGTGC
TGCTGCCCGACAACCACTACCTGAGCACCCAGTCCGCCCTGAGCAAA
GACCCCAACGAGAAGCGCGATCACATGGTCCTGCTGGAGTTCGTGAC
CGCCGCCGGGATCACTCTCGGCATGGACGAGCTGTACAAGTAAcctg
caggcgccggcgtcctctgagtgctgaaggcttgctgtaggctgtat
gctgATACTGTCATAGTAGTACCaggtttttgcctccaactgacctG
GTCTATATGACAGTATCAgtgtatgatgcctgttactagcattcaca
tggaGAGCTCGCTGATCAGCCTCGACTGTGCCTTCTAGTTGCCAGCC
ATCTGTTGTTTGCCCCTCCCCCGTGCCTTCCTTGACCCTGGAAGGTG
CCACTCCCACTGTCCTTTCCTAATAAAATGAGGAAATTGCATCGCAT
TGTCTGAGTAGGTGTCATTCTATTCTGGGGGGTGGGGTGGGGCAGGA
CAGCAAGGGGGAGGATTGGGAAGACAATAGCAGGCATGCTGGGGATG
CGGTGGGCTCTATGGAAGCTTGAATTCAGCTGACGTGCCTCGGACCG
CTAGGAACCCCTAGTGATGGAGTTGGCCACTCCCTCTCTGCGCGCTC
GCTCGCTCACTGAGGCCGGGCGACCAAAGGTCGCCCGACGCCCGGGC
TTTGCCCGGGCGGCCTCAGTGAGCGAGCGAGCGCGCAG
Exemplary pITR.CAG.miR7-155_EGFP
sequence
(SEQ ID NO: 212)
CTGCGCGCTCGCTCGCTCACTGAGGCCGCCCGGGCGTCGGGCGACCT
TTGGTCGCCCGGCCTCAGTGAGCGAGCGAGCGCGCAGAGAGGGAGTG
GCCAACTCCATCACTAGGGGTTCCTGCGGCCGCACGCGTGACATTGA
TTATTGACTAGTTATTAATAGTAATCAATTACGGGGTCATTAGTTCA
TAGCCCATATATGGAGTTCCGCGTTACATAACTTACGGTAAATGGCC
CGCCTGGCTGACCGCCCAACGACCCCCGCCCATTGACGTCAATAATG
ACGTATGTTCCCATAGTAACGCCAATAGGGACTTTCCATTGACGTCA
ATGGGTGGACTATTTACGGTAAACTGCCCACTTGGCAGTACATCAAG
TGTATCATATGCCAAGTACGCCCCCTATTGACGTCAATGACGGTAAA
TGGCCCGCCTGGCATTATGCCCAGTACATGACCTTATGGGACTTTCC
TACTTGGCAGTACATCTACGTATTAGTCATCGCTATTACCATGGGTC
GAGGTGAGCCCCACGTTCTGCTTCACTCTCCCCATCTCCCCCCCCTC
CCCACCCCCAATTTTGTATTTATTTATTTTTTAATTATTTTGTGCAG
CGATGGGGGCGGGGGGGGGGGGGGCGCGCGCCAGGCGGGGCGGGGCG
GGGCGAGGGGCGGGGCGGGGCGAGGCGGAGAGGTGCGGCGGCAGCCA
ATCAGAGCGGCGCGCTCCGAAAGTTTCCTTTTATGGCGAGGCGGCGG
CGGCGGCGGCCCTATAAAAAGCGAAGCGCGCGGCGGGCGGGAGTCGC
TGCGTTGCCTTCGCCCCGTGCCCCGCTCCGCGCCGCCTCGCGCCGCC
CGCCCCGGCTCTGACTGACCGCGTTACTCCCACAGGTGAGCGGGCGG
GACGGCCCTTCTCCTCCGGGCTGTAATTAGCGCTTGGTTTAATGACG
GCTCGTTTCTTTTCTGTGGCTGCGTGAAAGCCTTAAAGGGCTCCGGG
AGGGCCCTTTGTGCGGGGGGGAGCGGCTCGGGGGGTGCGTGCGTGTG
TGTGTGCGTGGGGAGCGCCGCGTGCGGCCCGCGCTGCCCGGCGGCTG
TGAGCGCTGCGGGCGCGGCGCGGGGCTTTGTGCGCTCCGCGTGTGCG
CGAGGGGAGCGCGGCCGGGGGCGGTGCCCCGCGGTGCGGGGGGGCTG
CGAGGGGAACAAAGGCTGCGTGCGGGGTGTGTGCGTGGGGGGGTGAG
CAGGGGGTGTGGGCGCGGCGGTCGGGCTGTAACCCCCCCCTGCACCC
CCCTCCCCGAGTTGCTGAGCACGGCCCGGCTTCGGGTGCGGGGCTCC
GTGCGGGGCGTGGCGCGGGGCTCGCCGTGCCGGGCGGGGGGTGGCGG
CAGGTGGGGGTGCCGGGCGGGGCGGGGCCGCCTCGGGCCGGGGAGGG
CTCGGGGGAGGGGCGCGGCGGCCCCCGGAGCGCCGGCGTCCTCTGAG
TGCTGAAGGCTTGCTGTAGGCTGTATGCTGTAGTCGGAGGTGATGTC
GGGGGTTTTTGCCTCCAACTGACTCCTGCATACCTTCGATTACAGTG
TATGATGCCTGTTACTAGCATTCACATGGATCTAGAGCCTCTGCTAA
CCATGTTCATGCCTTCTTCTTTTTCCTACAGCTCCTGGGCAACGTGC
TGGTTATTGTGACCGGTCGCTAGCCACCATGGTGAGCAAGGGCGAGG
AGCTGTTCACCGGGGTGGTGCCCATCCTGGTCGAGCTGGACGGCGAC
GTAAACGGCCACAAGTTCAGCGTGTCCGGCGAGGGCGAGGGCGATGC
CACCTACGGCAAGCTGACCCTGAAGTTCATCTGCACCACCGGCAAGC
TGCCCGTGCCCTGGCCCACCCTCGTGACCACCCTGACCTACGGCGTG
CAGTGCTTCAGCCGCTACCCCGACCACATGAAGCAGCACGACTTCTT
CAAGTCCGCCATGCCCGAAGGCTACGTCCAGGAGCGCACCATCTTCT
TCAAGGACGACGGCAACTACAAGACCCGCGCCGAGGTGAAGTTCGAG
GGCGACACCCTGGTGAACCGCATCGAGCTGAAGGGCATCGACTTCAA
GGAGGACGGCAACATCCTGGGGCACAAGCTGGAGTACAACTACAACA
GCCACAACGTCTATATCATGGCCGACAAGCAGAAGAACGGCATCAAG
GTGAACTTCAAGATCCGCCACAACATCGAGGACGGCAGCGTGCAGCT
CGCCGACCACTACCAGCAGAACACCCCCATCGGCGACGGCCCCGTGC
TGCTGCCCGACAACCACTACCTGAGCACCCAGTCCGCCCTGAGCAAA
GACCCCAACGAGAAGCGCGATCACATGGTCCTGCTGGAGTTCGTGAC
CGCCGCCGGGATCACTCTCGGCATGGACGAGCTGTACAAGTAACCTG
CAGGCGCCGGCGTCCTCTGAGTGCTGAAGGCTTGCTGTAGGCTGTAT
GCTGTAGTCGGAGGTGATGTCGGGGGTTTTTGCCTCCAACTGACTCC
TGCATACCTTCGATTACAGTGTATGATGCCTGTTACTAGCATTCACA
TGGAGAGCTCGCTGATCAGCCTCGACTGTGCCTTCTAGTTGCCAGCC
ATCTGTTGTTTGCCCCTCCCCCGTGCCTTCCTTGACCCTGGAAGGTG
CCACTCCCACTGTCCTTTCCTAATAAAATGAGGAAATTGCATCGCAT
TGTCTGAGTAGGTGTCATTCTATTCTGGGGGGTGGGGTGGGGCAGGA
CAGCAAGGGGGAGGATTGGGAAGACAATAGCAGGCATGCTGGGGATG
CGGTGGGCTCTATGGAAGCTTGAATTCAGCTGACGTGCCTCGGACCG
CTAGGAACCCCTAGTGATGGAGTTGGCCACTCCCTCTCTGCGCGCTC
GCTCGCTCACTGAGGCCGGGCGACCAAAGGTCGCCCGACGCCCGGGC
TTTGCCCGGGCGGCCTCAGTGAGCGAGCGAGCGCGCAG
Exemplary pITR.CAG.miR1-16_EGFP
sequence
(SEQ ID NO: 213)
CTGCGCGCTCGCTCGCTCACTGAGGCCGCCCGGGCGTCGGGCGACCT
TTGGTCGCCCGGCCTCAGTGAGCGAGCGAGCGCGCAGAGAGGGAGTG
GCCAACTCCATCACTAGGGGTTCCTGCGGCCGCACGCGTGACATTGA
TTATTGACTAGTTATTAATAGTAATCAATTACGGGGTCATTAGTTCA
TAGCCCATATATGGAGTTCCGCGTTACATAACTTACGGTAAATGGCC
CGCCTGGCTGACCGCCCAACGACCCCCGCCCATTGACGTCAATAATG
ACGTATGTTCCCATAGTAACGCCAATAGGGACTTTCCATTGACGTCA
ATGGGTGGACTATTTACGGTAAACTGCCCACTTGGCAGTACATCAAG
TGTATCATATGCCAAGTACGCCCCCTATTGACGTCAATGACGGTAAA
TGGCCCGCCTGGCATTATGCCCAGTACATGACCTTATGGGACTTTCC
TACTTGGCAGTACATCTACGTATTAGTCATCGCTATTACCATGGGTC
GAGGTGAGCCCCACGTTCTGCTTCACTCTCCCCATCTCCCCCCCCTC
CCCACCCCCAATTTTGTATTTATTTATTTTTTAATTATTTTGTGCAG
CGATGGGGGCGGGGGGGGGGGGGGCGCGCGCCAGGCGGGGCGGGGCG
GGGCGAGGGGCGGGGCGGGGCGAGGCGGAGAGGTGCGGCGGCAGCCA
ATCAGAGCGGCGCGCTCCGAAAGTTTCCTTTTATGGCGAGGCGGCGG
CGGCGGCGGCCCTATAAAAAGCGAAGCGCGCGGCGGGCGGGAGTCGC
TGCGTTGCCTTCGCCCCGTGCCCCGCTCCGCGCCGCCTCGCGCCGCC
CGCCCCGGCTCTGACTGACCGCGTTACTCCCACAGGTGAGCGGGCGG
GACGGCCCTTCTCCTCCGGGCTGTAATTAGCGCTTGGTTTAATGACG
GCTCGTTTCTTTTCTGTGGCTGCGTGAAAGCCTTAAAGGGCTCCGGG
AGGGCCCTTTGTGCGGGGGGGAGCGGCTCGGGGGGTGCGTGCGTGTG
TGTGTGCGTGGGGAGCGCCGCGTGCGGCCCGCGCTGCCCGGCGGCTG
TGAGCGCTGCGGGCGCGGCGCGGGGCTTTGTGCGCTCCGCGTGTGCG
CGAGGGGAGCGCGGCCGGGGGCGGTGCCCCGCGGTGCGGGGGGGCTG
CGAGGGGAACAAAGGCTGCGTGCGGGGTGTGTGCGTGGGGGGGTGAG
CAGGGGGTGTGGGCGCGGCGGTCGGGCTGTAACCCCCCCCTGCACCC
CCCTCCCCGAGTTGCTGAGCACGGCCCGGCTTCGGGTGCGGGGCTCC
GTGCGGGGCGTGGCGCGGGGCTCGCCGTGCCGGGCGGGGGGTGGCGG
CAGGTGGGGGTGCCGGGCGGGGCGGGGCCGCCTCGGGCCGGGGAGGG
CTCGGGGGAGGGGCGCGGCGGCCCCCGGAGCGCCGGCGCATAGCTCT
TATGATAGCAATGTCAGCAGTGCCTTTGAGAATCCTGATGGAGCggg
TTAAGATTCTAAAATTATCAcGCTCCATGAGTGATTCTCAGAAGTAA
GGTTGACCATACTCTACAGTTGTGTCTAGAGCCTCTGCTAACCATGT
TCATGCCTTCTTCTTTTTCCTACAGCTCCTGGGCAACGTGCTGGTTA
TTGTGACCGGTCGCTAGCCACCATGGTGAGCAAGGGCGAGGAGCTGT
TCACCGGGGTGGTGCCCATCCTGGTCGAGCTGGACGGCGACGTAAAC
GGCCACAAGTTCAGCGTGTCCGGCGAGGGCGAGGGCGATGCCACCTA
CGGCAAGCTGACCCTGAAGTTCATCTGCACCACCGGCAAGCTGCCCG
TGCCCTGGCCCACCCTCGTGACCACCCTGACCTACGGCGTGCAGTGC
TTCAGCCGCTACCCCGACCACATGAAGCAGCACGACTTCTTCAAGTC
CGCCATGCCCGAAGGCTACGTCCAGGAGCGCACCATCTTCTTCAAGG
ACGACGGCAACTACAAGACCCGCGCCGAGGTGAAGTTCGAGGGCGAC
ACCCTGGTGAACCGCATCGAGCTGAAGGGCATCGACTTCAAGGAGGA
CGGCAACATCCTGGGGCACAAGCTGGAGTACAACTACAACAGCCACA
ACGTCTATATCATGGCCGACAAGCAGAAGAACGGCATCAAGGTGAAC
TTCAAGATCCGCCACAACATCGAGGACGGCAGCGTGCAGCTCGCCGA
CCACTACCAGCAGAACACCCCCATCGGCGACGGCCCCGTGCTGCTGC
CCGACAACCACTACCTGAGCACCCAGTCCGCCCTGAGCAAAGACCCC
AACGAGAAGCGCGATCACATGGTCCTGCTGGAGTTCGTGACCGCCGC
CGGGATCACTCTCGGCATGGACGAGCTGTACAAGTAAcctgcaggcg
ccggcgCATAGCTCTTATGATAGCAATGTCAGCAGTGCCTTTGAGAA
TCCTGATGGAGCgggTTAAGATTCTAAAATTATCAcGCTCCATGAGT
GATTCTCAGAAGTAAGGTTGACCATACTCTACAGTTGTGGAGCTCGC
TGATCAGCCTCGACTGTGCCTTCTAGTTGCCAGCCATCTGTTGTTTG
CCCCTCCCCCGTGCCTTCCTTGACCCTGGAAGGTGCCACTCCCACTG
TCCTTTCCTAATAAAATGAGGAAATTGCATCGCATTGTCTGAGTAGG
TGTCATTCTATTCTGGGGGGTGGGGTGGGGCAGGACAGCAAGGGGGA
GGATTGGGAAGACAATAGCAGGCATGCTGGGGATGCGGTGGGCTCTA
TGGAAGCTTGAATTCAGCTGACGTGCCTCGGACCGCTAGGAACCCCT
AGTGATGGAGTTGGCCACTCCCTCTCTGCGCGCTCGCTCGCTCACTG
AGGCCGGGCGACCAAAGGTCGCCCGACGCCCGGGCTTTGCCCGGGCG
GCCTCAGTGAGCGAGCGAGCGCGCAG
Exemplary pITR.CAG.miR1-26_EGFP
sequence
(SEQ ID NO: 214)
CTGCGCGCTCGCTCGCTCACTGAGGCCGCCCGGGCGTCGGGCGACCT
TTGGTCGCCCGGCCTCAGTGAGCGAGCGAGCGCGCAGAGAGGGAGTG
GCCAACTCCATCACTAGGGGTTCCTGCGGCCGCACGCGTGACATTGA
TTATTGACTAGTTATTAATAGTAATCAATTACGGGGTCATTAGTTCA
TAGCCCATATATGGAGTTCCGCGTTACATAACTTACGGTAAATGGCC
CGCCTGGCTGACCGCCCAACGACCCCCGCCCATTGACGTCAATAATG
ACGTATGTTCCCATAGTAACGCCAATAGGGACTTTCCATTGACGTCA
ATGGGTGGACTATTTACGGTAAACTGCCCACTTGGCAGTACATCAAG
TGTATCATATGCCAAGTACGCCCCCTATTGACGTCAATGACGGTAAA
TGGCCCGCCTGGCATTATGCCCAGTACATGACCTTATGGGACTTTCC
TACTTGGCAGTACATCTACGTATTAGTCATCGCTATTACCATGGGTC
GAGGTGAGCCCCACGTTCTGCTTCACTCTCCCCATCTCCCCCCCCTC
CCCACCCCCAATTTTGTATTTATTTATTTTTTAATTATTTTGTGCAG
CGATGGGGGCGGGGGGGGGGGGGGCGCGCGCCAGGCGGGGCGGGGCG
GGGCGAGGGGCGGGGCGGGGCGAGGCGGAGAGGTGCGGCGGCAGCCA
ATCAGAGCGGCGCGCTCCGAAAGTTTCCTTTTATGGCGAGGCGGCGG
CGGCGGCGGCCCTATAAAAAGCGAAGCGCGCGGCGGGCGGGAGTCGC
TGCGTTGCCTTCGCCCCGTGCCCCGCTCCGCGCCGCCTCGCGCCGCC
CGCCCCGGCTCTGACTGACCGCGTTACTCCCACAGGTGAGCGGGCGG
GACGGCCCTTCTCCTCCGGGCTGTAATTAGCGCTTGGTTTAATGACG
GCTCGTTTCTTTTCTGTGGCTGCGTGAAAGCCTTAAAGGGCTCCGGG
AGGGCCCTTTGTGCGGGGGGGAGCGGCTCGGGGGGTGCGTGCGTGTG
TGTGTGCGTGGGGAGCGCCGCGTGCGGCCCGCGCTGCCCGGCGGCTG
TGAGCGCTGCGGGCGCGGCGCGGGGCTTTGTGCGCTCCGCGTGTGCG
CGAGGGGAGCGCGGCCGGGGGCGGTGCCCCGCGGTGCGGGGGGGCTG
CGAGGGGAACAAAGGCTGCGTGCGGGGTGTGTGCGTGGGGGGGTGAG
CAGGGGGTGTGGGCGCGGCGGTCGGGCTGTAACCCCCCCCTGCACCC
CCCTCCCCGAGTTGCTGAGCACGGCCCGGCTTCGGGTGCGGGGCTCC
GTGCGGGGCGTGGCGCGGGGCTCGCCGTGCCGGGCGGGGGGTGGCGG
CAGGTGGGGGTGCCGGGCGGGGCGGGGCCGCCTCGGGCCGGGGAGGG
CTCGGGGGAGGGGCGCGGCGGCCCCCGGAGCGCCGGCGGAGCAGGAG
GACCAAGGCCCTGGCGAAGGCCGTGGCCTCGTTGAGAATCCTGATGG
AGCggTGTGCAGGTCCCAATGGccGCTCCATAAGGATTCTCCACGGG
GACGCGGGCCTGGACGCCGGCATCCGGGCTCAGGACCCCCCTCTCTA
GAGCCTCTGCTAACCATGTTCATGCCTTCTTCTTTTTCCTACAGCTC
CTGGGCAACGTGCTGGTTATTGTGACCGGTCGCTAGCCACCATGGTG
AGCAAGGGCGAGGAGCTGTTCACCGGGGTGGTGCCCATCCTGGTCGA
GCTGGACGGCGACGTAAACGGCCACAAGTTCAGCGTGTCCGGCGAGG
GCGAGGGCGATGCCACCTACGGCAAGCTGACCCTGAAGTTCATCTGC
ACCACCGGCAAGCTGCCCGTGCCCTGGCCCACCCTCGTGACCACCCT
GACCTACGGCGTGCAGTGCTTCAGCCGCTACCCCGACCACATGAAGC
AGCACGACTTCTTCAAGTCCGCCATGCCCGAAGGCTACGTCCAGGAG
CGCACCATCTTCTTCAAGGACGACGGCAACTACAAGACCCGCGCCGA
GGTGAAGTTCGAGGGCGACACCCTGGTGAACCGCATCGAGCTGAAGG
GCATCGACTTCAAGGAGGACGGCAACATCCTGGGGCACAAGCTGGAG
TACAACTACAACAGCCACAACGTCTATATCATGGCCGACAAGCAGAA
GAACGGCATCAAGGTGAACTTCAAGATCCGCCACAACATCGAGGACG
GCAGCGTGCAGCTCGCCGACCACTACCAGCAGAACACCCCCATCGGC
GACGGCCCCGTGCTGCTGCCCGACAACCACTACCTGAGCACCCAGTC
CGCCCTGAGCAAAGACCCCAACGAGAAGCGCGATCACATGGTCCTGC
TGGAGTTCGTGACCGCCGCCGGGATCACTCTCGGCATGGACGAGCTG
TACAAGTAAcctgcaggcgccggcgGAGCAGGAGGACCAAGGCCCTG
GCGAAGGCCGTGGCCTCGTTGAGAATCCTGATGGAGCggTGTGCAGG
TCCCAATGGccGCTCCATAAGGATTCTCCACGGGGACGCGGGCCTGG
ACGCCGGCATCCGGGCTCAGGACCCCCCTCGAGCTCGCTGATCAGCC
TCGACTGTGCCTTCTAGTTGCCAGCCATCTGTTGTTTGCCCCTCCCC
CGTGCCTTCCTTGACCCTGGAAGGTGCCACTCCCACTGTCCTTTCCT
AATAAAATGAGGAAATTGCATCGCATTGTCTGAGTAGGTGTCATTCT
ATTCTGGGGGGTGGGGTGGGGCAGGACAGCAAGGGGGAGGATTGGGA
AGACAATAGCAGGCATGCTGGGGATGCGGTGGGCTCTATGGAAGCTT
GAATTCAGCTGACGTGCCTCGGACCGCTAGGAACCCCTAGTGATGGA
GTTGGCCACTCCCTCTCTGCGCGCTCGCTCGCTCACTGAGGCCGGGC
GACCAAAGGTCGCCCGACGCCCGGGCTTTGCCCGGGCGGCCTCAGTG
AGCGAGCGAGCGCGCAG
Exemplary pITR.CAG.miR1-96_EGFP
sequence
(SEQ ID NO: 215)
CTGCGCGCTCGCTCGCTCACTGAGGCCGCCCGGGCGTCGGGCGACCT
TTGGTCGCCCGGCCTCAGTGAGCGAGCGAGCGCGCAGAGAGGGAGTG
GCCAACTCCATCACTAGGGGTTCCTGCGGCCGCACGCGTGACATTGA
TTATTGACTAGTTATTAATAGTAATCAATTACGGGGTCATTAGTTCA
TAGCCCATATATGGAGTTCCGCGTTACATAACTTACGGTAAATGGCC
CGCCTGGCTGACCGCCCAACGACCCCCGCCCATTGACGTCAATAATG
ACGTATGTTCCCATAGTAACGCCAATAGGGACTTTCCATTGACGTCA
ATGGGTGGACTATTTACGGTAAACTGCCCACTTGGCAGTACATCAAG
TGTATCATATGCCAAGTACGCCCCCTATTGACGTCAATGACGGTAAA
TGGCCCGCCTGGCATTATGCCCAGTACATGACCTTATGGGACTTTCC
TACTTGGCAGTACATCTACGTATTAGTCATCGCTATTACCATGGGTC
GAGGTGAGCCCCACGTTCTGCTTCACTCTCCCCATCTCCCCCCCCTC
CCCACCCCCAATTTTGTATTTATTTATTTTTTAATTATTTTGTGCAG
CGATGGGGGCGGGGGGGGGGGGGGCGCGCGCCAGGCGGGGCGGGGCG
GGGCGAGGGGCGGGGCGGGGCGAGGCGGAGAGGTGCGGCGGCAGCCA
ATCAGAGCGGCGCGCTCCGAAAGTTTCCTTTTATGGCGAGGCGGCGG
CGGCGGCGGCCCTATAAAAAGCGAAGCGCGCGGCGGGCGGGAGTCGC
TGCGTTGCCTTCGCCCCGTGCCCCGCTCCGCGCCGCCTCGCGCCGCC
CGCCCCGGCTCTGACTGACCGCGTTACTCCCACAGGTGAGCGGGCGG
GACGGCCCTTCTCCTCCGGGCTGTAATTAGCGCTTGGTTTAATGACG
GCTCGTTTCTTTTCTGTGGCTGCGTGAAAGCCTTAAAGGGCTCCGGG
AGGGCCCTTTGTGCGGGGGGGAGCGGCTCGGGGGGTGCGTGCGTGTG
TGTGTGCGTGGGGAGCGCCGCGTGCGGCCCGCGCTGCCCGGCGGCTG
TGAGCGCTGCGGGCGCGGCGCGGGGCTTTGTGCGCTCCGCGTGTGCG
CGAGGGGAGCGCGGCCGGGGGCGGTGCCCCGCGGTGCGGGGGGGCTG
CGAGGGGAACAAAGGCTGCGTGCGGGGTGTGTGCGTGGGGGGGTGAG
CAGGGGGTGTGGGCGCGGCGGTCGGGCTGTAACCCCCCCCTGCACCC
CCCTCCCCGAGTTGCTGAGCACGGCCCGGCTTCGGGTGCGGGGCTCC
GTGCGGGGCGTGGCGCGGGGCTCGCCGTGCCGGGCGGGGGGTGGCGG
CAGGTGGGGGTGCCGGGCGGGGCGGGGCCGCCTCGGGCCGGGGAGGG
CTCGGGGGAGGGGCGCGGCGGCCCCCGGAGCGCCGGCGGTGTCCCCA
GAGAGCCCGCACCAGTGCCATCTGCTTGGCCGATTTGAGAATCCTGA
TGGAGCggCTTGTGTCTCTCCGCTCTGAGccGGGCCATCAGATTCTC
ATATGGGAAAAGCAGGACCCGCAGCTGCGTCCGCCTCCCCTGCATTC
TAGAGCCTCTGCTAACCATGTTCATGCCTTCTTCTTTTTCCTACAGC
TCCTGGGCAACGTGCTGGTTATTGTGACCGGTCGCTAGCCACCATGG
TGAGCAAGGGCGAGGAGCTGTTCACCGGGGTGGTGCCCATCCTGGTC
GAGCTGGACGGCGACGTAAACGGCCACAAGTTCAGCGTGTCCGGCGA
GGGCGAGGGCGATGCCACCTACGGCAAGCTGACCCTGAAGTTCATCT
GCACCACCGGCAAGCTGCCCGTGCCCTGGCCCACCCTCGTGACCACC
CTGACCTACGGCGTGCAGTGCTTCAGCCGCTACCCCGACCACATGAA
GCAGCACGACTTCTTCAAGTCCGCCATGCCCGAAGGCTACGTCCAGG
AGCGCACCATCTTCTTCAAGGACGACGGCAACTACAAGACCCGCGCC
GAGGTGAAGTTCGAGGGCGACACCCTGGTGAACCGCATCGAGCTGAA
GGGCATCGACTTCAAGGAGGACGGCAACATCCTGGGGCACAAGCTGG
AGTACAACTACAACAGCCACAACGTCTATATCATGGCCGACAAGCAG
AAGAACGGCATCAAGGTGAACTTCAAGATCCGCCACAACATCGAGGA
CGGCAGCGTGCAGCTCGCCGACCACTACCAGCAGAACACCCCCATCG
GCGACGGCCCCGTGCTGCTGCCCGACAACCACTACCTGAGCACCCAG
TCCGCCCTGAGCAAAGACCCCAACGAGAAGCGCGATCACATGGTCCT
GCTGGAGTTCGTGACCGCCGCCGGGATCACTCTCGGCATGGACGAGC
TGTACAAGTAAcctgcaggcgccggcgGTGTCCCCAGAGAGCCCGCA
CCAGTGCCATCTGCTTGGCCGATTTGAGAATCCTGATGGAGCggCTT
GTGTCTCTCCGCTCTGAGccGGGCCATCAGATTCTCATATGGGAAAA
GCAGGACCCGCAGCTGCGTCCGCCTCCCCTGCATGAGCTCGCTGATC
AGCCTCGACTGTGCCTTCTAGTTGCCAGCCATCTGTTGTTTGCCCCT
CCCCCGTGCCTTCCTTGACCCTGGAAGGTGCCACTCCCACTGTCCTT
TCCTAATAAAATGAGGAAATTGCATCGCATTGTCTGAGTAGGTGTCA
TTCTATTCTGGGGGGTGGGGTGGGGCAGGACAGCAAGGGGGAGGATT
GGGAAGACAATAGCAGGCATGCTGGGGATGCGGTGGGCTCTATGGAA
GCTTGAATTCAGCTGACGTGCCTCGGACCGCTAGGAACCCCTAGTGA
TGGAGTTGGCCACTCCCTCTCTGCGCGCTCGCTCGCTCACTGAGGCC
GGGCGACCAAAGGTCGCCCGACGCCCGGGCTTTGCCCGGGCGGCCTC
AGTGAGCGAGCGAGCGCGCAG
Exemplary pITR.CAG.miR1-122_EGFP
sequence
(SEQ ID NO: 216)
CTGCGCGCTCGCTCGCTCACTGAGGCCGCCCGGGCGTCGGGCGACCT
TTGGTCGCCCGGCCTCAGTGAGCGAGCGAGCGCGCAGAGAGGGAGTG
GCCAACTCCATCACTAGGGGTTCCTGCGGCCGCACGCGTGACATTGA
TTATTGACTAGTTATTAATAGTAATCAATTACGGGGTCATTAGTTCA
TAGCCCATATATGGAGTTCCGCGTTACATAACTTACGGTAAATGGCC
CGCCTGGCTGACCGCCCAACGACCCCCGCCCATTGACGTCAATAATG
ACGTATGTTCCCATAGTAACGCCAATAGGGACTTTCCATTGACGTCA
ATGGGTGGACTATTTACGGTAAACTGCCCACTTGGCAGTACATCAAG
TGTATCATATGCCAAGTACGCCCCCTATTGACGTCAATGACGGTAAA
TGGCCCGCCTGGCATTATGCCCAGTACATGACCTTATGGGACTTTCC
TACTTGGCAGTACATCTACGTATTAGTCATCGCTATTACCATGGGTC
GAGGTGAGCCCCACGTTCTGCTTCACTCTCCCCATCTCCCCCCCCTC
CCCACCCCCAATTTTGTATTTATTTATTTTTTAATTATTTTGTGCAG
CGATGGGGGCGGGGGGGGGGGGGGCGCGCGCCAGGCGGGGCGGGGCG
GGGCGAGGGGCGGGGCGGGGCGAGGCGGAGAGGTGCGGCGGCAGCCA
ATCAGAGCGGCGCGCTCCGAAAGTTTCCTTTTATGGCGAGGCGGCGG
CGGCGGCGGCCCTATAAAAAGCGAAGCGCGCGGCGGGCGGGAGTCGC
TGCGTTGCCTTCGCCCCGTGCCCCGCTCCGCGCCGCCTCGCGCCGCC
CGCCCCGGCTCTGACTGACCGCGTTACTCCCACAGGTGAGCGGGCGG
GACGGCCCTTCTCCTCCGGGCTGTAATTAGCGCTTGGTTTAATGACG
GCTCGTTTCTTTTCTGTGGCTGCGTGAAAGCCTTAAAGGGCTCCGGG
AGGGCCCTTTGTGCGGGGGGGAGCGGCTCGGGGGGTGCGTGCGTGTG
TGTGTGCGTGGGGAGCGCCGCGTGCGGCCCGCGCTGCCCGGCGGCTG
TGAGCGCTGCGGGCGCGGCGCGGGGCTTTGTGCGCTCCGCGTGTGCG
CGAGGGGAGCGCGGCCGGGGGCGGTGCCCCGCGGTGCGGGGGGGCTG
CGAGGGGAACAAAGGCTGCGTGCGGGGTGTGTGCGTGGGGGGGTGAG
CAGGGGGTGTGGGCGCGGCGGTCGGGCTGTAACCCCCCCCTGCACCC
CCCTCCCCGAGTTGCTGAGCACGGCCCGGCTTCGGGTGCGGGGCTCC
GTGCGGGGCGTGGCGCGGGGCTCGCCGTGCCGGGCGGGGGGTGGCGG
CAGGTGGGGGTGCCGGGCGGGGCGGGGCCGCCTCGGGCCGGGGAGGG
CTCGGGGGAGGGGCGCGGCGGCCCCCGGAGCGCCGGCGTGAAGTTAA
CACCTTCGTGGCTACAGAGTTTCCTTAGCAGAGCTGTTGAGAATCCT
GATGGAGCggGTGTCTAAACTATCccGCTCCATCcGGATTCTACATA
GCTACTGCTAGGCAATCCTTCCCTCGATAAATGTCTTGGCATCGTCT
AGAGCCTCTGCTAACCATGTTCATGCCTTCTTCTTTTTCCTACAGCT
CCTGGGCAACGTGCTGGTTATTGTGACCGGTCGCTAGCCACCATGGT
GAGCAAGGGCGAGGAGCTGTTCACCGGGGTGGTGCCCATCCTGGTCG
AGCTGGACGGCGACGTAAACGGCCACAAGTTCAGCGTGTCCGGCGAG
GGCGAGGGCGATGCCACCTACGGCAAGCTGACCCTGAAGTTCATCTG
CACCACCGGCAAGCTGCCCGTGCCCTGGCCCACCCTCGTGACCACCC
TGACCTACGGCGTGCAGTGCTTCAGCCGCTACCCCGACCACATGAAG
CAGCACGACTTCTTCAAGTCCGCCATGCCCGAAGGCTACGTCCAGGA
GCGCACCATCTTCTTCAAGGACGACGGCAACTACAAGACCCGCGCCG
AGGTGAAGTTCGAGGGCGACACCCTGGTGAACCGCATCGAGCTGAAG
GGCATCGACTTCAAGGAGGACGGCAACATCCTGGGGCACAAGCTGGA
GTACAACTACAACAGCCACAACGTCTATATCATGGCCGACAAGCAGA
AGAACGGCATCAAGGTGAACTTCAAGATCCGCCACAACATCGAGGAC
GGCAGCGTGCAGCTCGCCGACCACTACCAGCAGAACACCCCCATCGG
CGACGGCCCCGTGCTGCTGCCCGACAACCACTACCTGAGCACCCAGT
CCGCCCTGAGCAAAGACCCCAACGAGAAGCGCGATCACATGGTCCTG
CTGGAGTTCGTGACCGCCGCCGGGATCACTCTCGGCATGGACGAGCT
GTACAAGTAAcctgcaggcgccggcgTGAAGTTAACACCTTCGTGGC
TACAGAGTTTCCTTAGCAGAGCTGTTGAGAATCCTGATGGAGCggGT
GTCTAAACTATCccGCTCCATCcGGATTCTACATAGCTACTGCTAGG
CAATCCTTCCCTCGATAAATGTCTTGGCATCGGAGCTCGCTGATCAG
CCTCGACTGTGCCTTCTAGTTGCCAGCCATCTGTTGTTTGCCCCTCC
CCCGTGCCTTCCTTGACCCTGGAAGGTGCCACTCCCACTGTCCTTTC
CTAATAAAATGAGGAAATTGCATCGCATTGTCTGAGTAGGTGTCATT
CTATTCTGGGGGGTGGGGTGGGGCAGGACAGCAAGGGGGAGGATTGG
GAAGACAATAGCAGGCATGCTGGGGATGCGGTGGGCTCTATGGAAGC
TTGAATTCAGCTGACGTGCCTCGGACCGCTAGGAACCCCTAGTGATG
GAGTTGGCCACTCCCTCTCTGCGCGCTCGCTCGCTCACTGAGGCCGG
GCGACCAAAGGTCGCCCGACGCCCGGGCTTTGCCCGGGCGGCCTCAG
TGAGCGAGCGAGCGCGCAG
Exemplary pITR.CAG.miR1-135_EGFP
sequence
(SEQ ID NO: 217)
CTGCGCGCTCGCTCGCTCACTGAGGCCGCCCGGGCGTCGGGCGACCT
TTGGTCGCCCGGCCTCAGTGAGCGAGCGAGCGCGCAGAGAGGGAGTG
GCCAACTCCATCACTAGGGGTTCCTGCGGCCGCACGCGTGACATTGA
TTATTGACTAGTTATTAATAGTAATCAATTACGGGGTCATTAGTTCA
TAGCCCATATATGGAGTTCCGCGTTACATAACTTACGGTAAATGGCC
CGCCTGGCTGACCGCCCAACGACCCCCGCCCATTGACGTCAATAATG
ACGTATGTTCCCATAGTAACGCCAATAGGGACTTTCCATTGACGTCA
ATGGGTGGACTATTTACGGTAAACTGCCCACTTGGCAGTACATCAAG
TGTATCATATGCCAAGTACGCCCCCTATTGACGTCAATGACGGTAAA
TGGCCCGCCTGGCATTATGCCCAGTACATGACCTTATGGGACTTTCC
TACTTGGCAGTACATCTACGTATTAGTCATCGCTATTACCATGGGTC
GAGGTGAGCCCCACGTTCTGCTTCACTCTCCCCATCTCCCCCCCCTC
CCCACCCCCAATTTTGTATTTATTTATTTTTTAATTATTTTGTGCAG
CGATGGGGGCGGGGGGGGGGGGGGCGCGCGCCAGGCGGGGCGGGGCG
GGGCGAGGGGCGGGGCGGGGCGAGGCGGAGAGGTGCGGCGGCAGCCA
ATCAGAGCGGCGCGCTCCGAAAGTTTCCTTTTATGGCGAGGCGGCGG
CGGCGGCGGCCCTATAAAAAGCGAAGCGCGCGGCGGGCGGGAGTCGC
TGCGTTGCCTTCGCCCCGTGCCCCGCTCCGCGCCGCCTCGCGCCGCC
CGCCCCGGCTCTGACTGACCGCGTTACTCCCACAGGTGAGCGGGCGG
GACGGCCCTTCTCCTCCGGGCTGTAATTAGCGCTTGGTTTAATGACG
GCTCGTTTCTTTTCTGTGGCTGCGTGAAAGCCTTAAAGGGCTCCGGG
AGGGCCCTTTGTGCGGGGGGGAGCGGCTCGGGGGGTGCGTGCGTGTG
TGTGTGCGTGGGGAGCGCCGCGTGCGGCCCGCGCTGCCCGGCGGCTG
TGAGCGCTGCGGGCGCGGCGCGGGGCTTTGTGCGCTCCGCGTGTGCG
CGAGGGGAGCGCGGCCGGGGGCGGTGCCCCGCGGTGCGGGGGGGCTG
CGAGGGGAACAAAGGCTGCGTGCGGGGTGTGTGCGTGGGGGGGTGAG
CAGGGGGTGTGGGCGCGGCGGTCGGGCTGTAACCCCCCCCTGCACCC
CCCTCCCCGAGTTGCTGAGCACGGCCCGGCTTCGGGTGCGGGGCTCC
GTGCGGGGCGTGGCGCGGGGCTCGCCGTGCCGGGCGGGGGGTGGCGG
CAGGTGGGGGTGCCGGGCGGGGCGGGGCCGCCTCGGGCCGGGGAGGG
CTCGGGGGAGGGGCGCGGCGGCCCCCGGAGCGCCGGCGGCCGCTGGA
CCCCTCCACTCTGCTGTGGCCTTGAGAATCCTGATGGAGCggGATTG
CTGTCCCAAACTCccGCTCCATCGGATTCTCAAGGCTACAGTGAGGG
GCGAGCTCCTTCTCCTGCTCTAGAGCCTCTGCTAACCATGTTCATGC
CTTCTTCTTTTTCCTACAGCTCCTGGGCAACGTGCTGGTTATTGTGA
CCGGTCGCTAGCCACCATGGTGAGCAAGGGCGAGGAGCTGTTCACCG
GGGTGGTGCCCATCCTGGTCGAGCTGGACGGCGACGTAAACGGCCAC
AAGTTCAGCGTGTCCGGCGAGGGCGAGGGCGATGCCACCTACGGCAA
GCTGACCCTGAAGTTCATCTGCACCACCGGCAAGCTGCCCGTGCCCT
GGCCCACCCTCGTGACCACCCTGACCTACGGCGTGCAGTGCTTCAGC
CGCTACCCCGACCACATGAAGCAGCACGACTTCTTCAAGTCCGCCAT
GCCCGAAGGCTACGTCCAGGAGCGCACCATCTTCTTCAAGGACGACG
GCAACTACAAGACCCGCGCCGAGGTGAAGTTCGAGGGCGACACCCTG
GTGAACCGCATCGAGCTGAAGGGCATCGACTTCAAGGAGGACGGCAA
CATCCTGGGGCACAAGCTGGAGTACAACTACAACAGCCACAACGTCT
ATATCATGGCCGACAAGCAGAAGAACGGCATCAAGGTGAACTTCAAG
ATCCGCCACAACATCGAGGACGGCAGCGTGCAGCTCGCCGACCACTA
CCAGCAGAACACCCCCATCGGCGACGGCCCCGTGCTGCTGCCCGACA
ACCACTACCTGAGCACCCAGTCCGCCCTGAGCAAAGACCCCAACGAG
AAGCGCGATCACATGGTCCTGCTGGAGTTCGTGACCGCCGCCGGGAT
CACTCTCGGCATGGACGAGCTGTACAAGTAAcctgcaggcgccggcg
GCCGCTGGACCCCTCCACTCTGCTGTGGCCTTGAGAATCCTGATGGA
GCggGATTGCTGTCCCAAACTCccGCTCCATCGGATTCTCAAGGCTA
CAGTGAGGGGCGAGCTCCTTCTCCTGCGAGCTCGCTGATCAGCCTCG
ACTGTGCCTTCTAGTTGCCAGCCATCTGTTGTTTGCCCCTCCCCCGT
GCCTTCCTTGACCCTGGAAGGTGCCACTCCCACTGTCCTTTCCTAAT
AAAATGAGGAAATTGCATCGCATTGTCTGAGTAGGTGTCATTCTATT
CTGGGGGGTGGGGTGGGGCAGGACAGCAAGGGGGAGGATTGGGAAGA
CAATAGCAGGCATGCTGGGGATGCGGTGGGCTCTATGGAAGCTTGAA
TTCAGCTGACGTGCCTCGGACCGCTAGGAACCCCTAGTGATGGAGTT
GGCCACTCCCTCTCTGCGCGCTCGCTCGCTCACTGAGGCCGGGCGAC
CAAAGGTCGCCCGACGCCCGGGCTTTGCCCGGGCGGCCTCAGTGAGC
GAGCGAGCGCGCAG
Exemplary pITR.CAG.miR1-182_EGFP
sequence
(SEQ ID NO: 218)
CTGCGCGCTCGCTCGCTCACTGAGGCCGCCCGGGCGTCGGGCGACCT
TTGGTCGCCCGGCCTCAGTGAGCGAGCGAGCGCGCAGAGAGGGAGTG
GCCAACTCCATCACTAGGGGTTCCTGCGGCCGCACGCGTGACATTGA
TTATTGACTAGTTATTAATAGTAATCAATTACGGGGTCATTAGTTCA
TAGCCCATATATGGAGTTCCGCGTTACATAACTTACGGTAAATGGCC
CGCCTGGCTGACCGCCCAACGACCCCCGCCCATTGACGTCAATAATG
ACGTATGTTCCCATAGTAACGCCAATAGGGACTTTCCATTGACGTCA
ATGGGTGGACTATTTACGGTAAACTGCCCACTTGGCAGTACATCAAG
TGTATCATATGCCAAGTACGCCCCCTATTGACGTCAATGACGGTAAA
TGGCCCGCCTGGCATTATGCCCAGTACATGACCTTATGGGACTTTCC
TACTTGGCAGTACATCTACGTATTAGTCATCGCTATTACCATGGGTC
GAGGTGAGCCCCACGTTCTGCTTCACTCTCCCCATCTCCCCCCCCTC
CCCACCCCCAATTTTGTATTTATTTATTTTTTAATTATTTTGTGCAG
CGATGGGGGCGGGGGGGGGGGGGGCGCGCGCCAGGCGGGGCGGGGCG
GGGCGAGGGGCGGGGCGGGGCGAGGCGGAGAGGTGCGGCGGCAGCCA
ATCAGAGCGGCGCGCTCCGAAAGTTTCCTTTTATGGCGAGGCGGCGG
CGGCGGCGGCCCTATAAAAAGCGAAGCGCGCGGCGGGCGGGAGTCGC
TGCGTTGCCTTCGCCCCGTGCCCCGCTCCGCGCCGCCTCGCGCCGCC
CGCCCCGGCTCTGACTGACCGCGTTACTCCCACAGGTGAGCGGGCGG
GACGGCCCTTCTCCTCCGGGCTGTAATTAGCGCTTGGTTTAATGACG
GCTCGTTTCTTTTCTGTGGCTGCGTGAAAGCCTTAAAGGGCTCCGGG
AGGGCCCTTTGTGCGGGGGGGAGCGGCTCGGGGGGTGCGTGCGTGTG
TGTGTGCGTGGGGAGCGCCGCGTGCGGCCCGCGCTGCCCGGCGGCTG
TGAGCGCTGCGGGCGCGGCGCGGGGCTTTGTGCGCTCCGCGTGTGCG
CGAGGGGAGCGCGGCCGGGGGCGGTGCCCCGCGGTGCGGGGGGGCTG
CGAGGGGAACAAAGGCTGCGTGCGGGGTGTGTGCGTGGGGGGGTGAG
CAGGGGGTGTGGGCGCGGCGGTCGGGCTGTAACCCCCCCCTGCACCC
CCCTCCCCGAGTTGCTGAGCACGGCCCGGCTTCGGGTGCGGGGCTCC
GTGCGGGGCGTGGCGCGGGGCTCGCCGTGCCGGGCGGGGGGTGGCGG
CAGGTGGGGGTGCCGGGCGGGGCGGGGCCGCCTCGGGCCGGGGAGGG
CTCGGGGGAGGGGCGCGGCGGCCCCCGGAGCGCCGGCGCTCCCCAGC
TCCTGGGGGGAGCTGCTTGCCTCCCCCCGTTTTGAGAATCCTGATGG
AGCggACTGGTGAGGTAACAGGATCCGCCGTCCATCTTTATTCTCAC
TATGGGGCGAGGACTCAGCCGGCACCCTGTGCACAGCCAGCGAGGGT
CTAGAGCCTCTGCTAACCATGTTCATGCCTTCTTCTTTTTCCTACAG
CTCCTGGGCAACGTGCTGGTTATTGTGACCGGTCGCTAGCCACCATG
GTGAGCAAGGGCGAGGAGCTGTTCACCGGGGTGGTGCCCATCCTGGT
CGAGCTGGACGGCGACGTAAACGGCCACAAGTTCAGCGTGTCCGGCG
AGGGCGAGGGCGATGCCACCTACGGCAAGCTGACCCTGAAGTTCATC
TGCACCACCGGCAAGCTGCCCGTGCCCTGGCCCACCCTCGTGACCAC
CCTGACCTACGGCGTGCAGTGCTTCAGCCGCTACCCCGACCACATGA
AGCAGCACGACTTCTTCAAGTCCGCCATGCCCGAAGGCTACGTCCAG
GAGCGCACCATCTTCTTCAAGGACGACGGCAACTACAAGACCCGCGC
CGAGGTGAAGTTCGAGGGCGACACCCTGGTGAACCGCATCGAGCTGA
AGGGCATCGACTTCAAGGAGGACGGCAACATCCTGGGGCACAAGCTG
GAGTACAACTACAACAGCCACAACGTCTATATCATGGCCGACAAGCA
GAAGAACGGCATCAAGGTGAACTTCAAGATCCGCCACAACATCGAGG
ACGGCAGCGTGCAGCTCGCCGACCACTACCAGCAGAACACCCCCATC
GGCGACGGCCCCGTGCTGCTGCCCGACAACCACTACCTGAGCACCCA
GTCCGCCCTGAGCAAAGACCCCAACGAGAAGCGCGATCACATGGTCC
TGCTGGAGTTCGTGACCGCCGCCGGGATCACTCTCGGCATGGACGAG
CTGTACAAGTAAcctgcaggcgccggcgCTCCCCAGCTCCTGGGGGG
AGCTGCTTGCCTCCCCCCGTTTTGAGAATCCTGATGGAGCggACTGG
TGAGGTAACAGGATCCGCCGTCCATCTTTATTCTCACTATGGGGCGA
GGACTCAGCCGGCACCCTGTGCACAGCCAGCGAGGGGAGCTCGCTGA
TCAGCCTCGACTGTGCCTTCTAGTTGCCAGCCATCTGTTGTTTGCCC
CTCCCCCGTGCCTTCCTTGACCCTGGAAGGTGCCACTCCCACTGTCC
TTTCCTAATAAAATGAGGAAATTGCATCGCATTGTCTGAGTAGGTGT
CATTCTATTCTGGGGGGTGGGGTGGGGCAGGACAGCAAGGGGGAGGA
TTGGGAAGACAATAGCAGGCATGCTGGGGATGCGGTGGGCTCTATGG
AAGCTTGAATTCAGCTGACGTGCCTCGGACCGCTAGGAACCCCTAGT
GATGGAGTTGGCCACTCCCTCTCTGCGCGCTCGCTCGCTCACTGAGG
CCGGGCGACCAAAGGTCGCCCGACGCCCGGGCTTTGCCCGGGCGGCC
TCAGTGAGCGAGCGAGCGCGCAG
Exemplary pITR.CAG.miR1-183_EGFP
sequence
(SEQ ID NO: 219)
CTGCGCGCTCGCTCGCTCACTGAGGCCGCCCGGGCGTCGGGCGACCT
TTGGTCGCCCGGCCTCAGTGAGCGAGCGAGCGCGCAGAGAGGGAGTG
GCCAACTCCATCACTAGGGGTTCCTGCGGCCGCACGCGTGACATTGA
TTATTGACTAGTTATTAATAGTAATCAATTACGGGGTCATTAGTTCA
TAGCCCATATATGGAGTTCCGCGTTACATAACTTACGGTAAATGGCC
CGCCTGGCTGACCGCCCAACGACCCCCGCCCATTGACGTCAATAATG
ACGTATGTTCCCATAGTAACGCCAATAGGGACTTTCCATTGACGTCA
ATGGGTGGACTATTTACGGTAAACTGCCCACTTGGCAGTACATCAAG
TGTATCATATGCCAAGTACGCCCCCTATTGACGTCAATGACGGTAAA
TGGCCCGCCTGGCATTATGCCCAGTACATGACCTTATGGGACTTTCC
TACTTGGCAGTACATCTACGTATTAGTCATCGCTATTACCATGGGTC
GAGGTGAGCCCCACGTTCTGCTTCACTCTCCCCATCTCCCCCCCCTC
CCCACCCCCAATTTTGTATTTATTTATTTTTTAATTATTTTGTGCAG
CGATGGGGGCGGGGGGGGGGGGGGCGCGCGCCAGGCGGGGCGGGGCG
GGGCGAGGGGCGGGGCGGGGCGAGGCGGAGAGGTGCGGCGGCAGCCA
ATCAGAGCGGCGCGCTCCGAAAGTTTCCTTTTATGGCGAGGCGGCGG
CGGCGGCGGCCCTATAAAAAGCGAAGCGCGCGGCGGGCGGGAGTCGC
TGCGTTGCCTTCGCCCCGTGCCCCGCTCCGCGCCGCCTCGCGCCGCC
CGCCCCGGCTCTGACTGACCGCGTTACTCCCACAGGTGAGCGGGCGG
GACGGCCCTTCTCCTCCGGGCTGTAATTAGCGCTTGGTTTAATGACG
GCTCGTTTCTTTTCTGTGGCTGCGTGAAAGCCTTAAAGGGCTCCGGG
AGGGCCCTTTGTGCGGGGGGGAGCGGCTCGGGGGGTGCGTGCGTGTG
TGTGTGCGTGGGGAGCGCCGCGTGCGGCCCGCGCTGCCCGGCGGCTG
TGAGCGCTGCGGGCGCGGCGCGGGGCTTTGTGCGCTCCGCGTGTGCG
CGAGGGGAGCGCGGCCGGGGGCGGTGCCCCGCGGTGCGGGGGGGCTG
CGAGGGGAACAAAGGCTGCGTGCGGGGTGTGTGCGTGGGGGGGTGAG
CAGGGGGTGTGGGCGCGGCGGTCGGGCTGTAACCCCCCCCTGCACCC
CCCTCCCCGAGTTGCTGAGCACGGCCCGGCTTCGGGTGCGGGGCTCC
GTGCGGGGCGTGGCGCGGGGCTCGCCGTGCCGGGCGGGGGGTGGCGG
CAGGTGGGGGTGCCGGGCGGGGCGGGGCCGCCTCGGGCCGGGGAGGG
CTCGGGGGAGGGGCGCGGCGGCCCCCGGAGCGCCGGCGAGGGTCGGC
AGGCCGCAGAGTGTGACTCCTGTTCTGTGTTTGAGAATCCTGATGGA
GCggGTGAACAGTCTCAGTCccGCTCCCAGGAAATGGTCAAAAACAG
AGCAGAGACAGATCCACGAGGGCCTCCGGAGCACCTTTCTAGAGCCT
CTGCTAACCATGTTCATGCCTTCTTCTTTTTCCTACAGCTCCTGGGC
AACGTGCTGGTTATTGTGACCGGTCGCTAGCCACCATGGTGAGCAAG
GGCGAGGAGCTGTTCACCGGGGTGGTGCCCATCCTGGTCGAGCTGGA
CGGCGACGTAAACGGCCACAAGTTCAGCGTGTCCGGCGAGGGCGAGG
GCGATGCCACCTACGGCAAGCTGACCCTGAAGTTCATCTGCACCACC
GGCAAGCTGCCCGTGCCCTGGCCCACCCTCGTGACCACCCTGACCTA
CGGCGTGCAGTGCTTCAGCCGCTACCCCGACCACATGAAGCAGCACG
ACTTCTTCAAGTCCGCCATGCCCGAAGGCTACGTCCAGGAGCGCACC
ATCTTCTTCAAGGACGACGGCAACTACAAGACCCGCGCCGAGGTGAA
GTTCGAGGGCGACACCCTGGTGAACCGCATCGAGCTGAAGGGCATCG
ACTTCAAGGAGGACGGCAACATCCTGGGGCACAAGCTGGAGTACAAC
TACAACAGCCACAACGTCTATATCATGGCCGACAAGCAGAAGAACGG
CATCAAGGTGAACTTCAAGATCCGCCACAACATCGAGGACGGCAGCG
TGCAGCTCGCCGACCACTACCAGCAGAACACCCCCATCGGCGACGGC
CCCGTGCTGCTGCCCGACAACCACTACCTGAGCACCCAGTCCGCCCT
GAGCAAAGACCCCAACGAGAAGCGCGATCACATGGTCCTGCTGGAGT
TCGTGACCGCCGCCGGGATCACTCTCGGCATGGACGAGCTGTACAAG
TAAcctgcaggcgccggcgAGGGTCGGCAGGCCGCAGAGTGTGACTC
CTGTTCTGTGTTTGAGAATCCTGATGGAGCggGTGAACAGTCTCAGT
CccGCTCCCAGGAAATGGTCAAAAACAGAGCAGAGACAGATCCACGA
GGGCCTCCGGAGCACCTTGAGCTCGCTGATCAGCCTCGACTGTGCCT
TCTAGTTGCCAGCCATCTGTTGTTTGCCCCTCCCCCGTGCCTTCCTT
GACCCTGGAAGGTGCCACTCCCACTGTCCTTTCCTAATAAAATGAGG
AAATTGCATCGCATTGTCTGAGTAGGTGTCATTCTATTCTGGGGGGT
GGGGTGGGGCAGGACAGCAAGGGGGAGGATTGGGAAGACAATAGCAG
GCATGCTGGGGATGCGGTGGGCTCTATGGAAGCTTGAATTCAGCTGA
CGTGCCTCGGACCGCTAGGAACCCCTAGTGATGGAGTTGGCCACTCC
CTCTCTGCGCGCTCGCTCGCTCACTGAGGCCGGGCGACCAAAGGTCG
CCCGACGCCCGGGCTTTGCCCGGGCGGCCTCAGTGAGCGAGCGAGCG
CGCAG
Exemplary pITR.CAG.miR1-335_EGFP
sequence
(SEQ ID NO: 220)
CTGCGCGCTCGCTCGCTCACTGAGGCCGCCCGGGCGTCGGGCGACCT
TTGGTCGCCCGGCCTCAGTGAGCGAGCGAGCGCGCAGAGAGGGAGTG
GCCAACTCCATCACTAGGGGTTCCTGCGGCCGCACGCGTGACATTGA
TTATTGACTAGTTATTAATAGTAATCAATTACGGGGTCATTAGTTCA
TAGCCCATATATGGAGTTCCGCGTTACATAACTTACGGTAAATGGCC
CGCCTGGCTGACCGCCCAACGACCCCCGCCCATTGACGTCAATAATG
ACGTATGTTCCCATAGTAACGCCAATAGGGACTTTCCATTGACGTCA
ATGGGTGGACTATTTACGGTAAACTGCCCACTTGGCAGTACATCAAG
TGTATCATATGCCAAGTACGCCCCCTATTGACGTCAATGACGGTAAA
TGGCCCGCCTGGCATTATGCCCAGTACATGACCTTATGGGACTTTCC
TACTTGGCAGTACATCTACGTATTAGTCATCGCTATTACCATGGGTC
GAGGTGAGCCCCACGTTCTGCTTCACTCTCCCCATCTCCCCCCCCTC
CCCACCCCCAATTTTGTATTTATTTATTTTTTAATTATTTTGTGCAG
CGATGGGGGCGGGGGGGGGGGGGGCGCGCGCCAGGCGGGGCGGGGCG
GGGCGAGGGGCGGGGCGGGGCGAGGCGGAGAGGTGCGGCGGCAGCCA
ATCAGAGCGGCGCGCTCCGAAAGTTTCCTTTTATGGCGAGGCGGCGG
CGGCGGCGGCCCTATAAAAAGCGAAGCGCGCGGCGGGCGGGAGTCGC
TGCGTTGCCTTCGCCCCGTGCCCCGCTCCGCGCCGCCTCGCGCCGCC
CGCCCCGGCTCTGACTGACCGCGTTACTCCCACAGGTGAGCGGGCGG
GACGGCCCTTCTCCTCCGGGCTGTAATTAGCGCTTGGTTTAATGACG
GCTCGTTTCTTTTCTGTGGCTGCGTGAAAGCCTTAAAGGGCTCCGGG
AGGGCCCTTTGTGCGGGGGGGAGCGGCTCGGGGGGTGCGTGCGTGTG
TGTGTGCGTGGGGAGCGCCGCGTGCGGCCCGCGCTGCCCGGCGGCTG
TGAGCGCTGCGGGCGCGGCGCGGGGCTTTGTGCGCTCCGCGTGTGCG
CGAGGGGAGCGCGGCCGGGGGCGGTGCCCCGCGGTGCGGGGGGGCTG
CGAGGGGAACAAAGGCTGCGTGCGGGGTGTGTGCGTGGGGGGGTGAG
CAGGGGGTGTGGGCGCGGCGGTCGGGCTGTAACCCCCCCCTGCACCC
CCCTCCCCGAGTTGCTGAGCACGGCCCGGCTTCGGGTGCGGGGCTCC
GTGCGGGGCGTGGCGCGGGGCTCGCCGTGCCGGGCGGGGGGTGGCGG
CAGGTGGGGGTGCCGGGCGGGGCGGGGCCGCCTCGGGCCGGGGAGGG
CTCGGGGGAGGGGCGCGGCGGCCCCCGGAGCGCCGGCGGAAACAGAT
TGGAAATGATTTGTTTTGAGCGGGGGTTGAGAATCCTGATGGAGCgg
GTTTGTCATAAACCccGCTCCCTCAGGATTCCCAACCTCCTCTCATT
TGCTATATTCAATTAAGTAATCTAGAGCCTCTGCTAACCATGTTCAT
GCCTTCTTCTTTTTCCTACAGCTCCTGGGCAACGTGCTGGTTATTGT
GACCGGTCGCTAGCCACCATGGTGAGCAAGGGCGAGGAGCTGTTCAC
CGGGGTGGTGCCCATCCTGGTCGAGCTGGACGGCGACGTAAACGGCC
ACAAGTTCAGCGTGTCCGGCGAGGGCGAGGGCGATGCCACCTACGGC
AAGCTGACCCTGAAGTTCATCTGCACCACCGGCAAGCTGCCCGTGCC
CTGGCCCACCCTCGTGACCACCCTGACCTACGGCGTGCAGTGCTTCA
GCCGCTACCCCGACCACATGAAGCAGCACGACTTCTTCAAGTCCGCC
ATGCCCGAAGGCTACGTCCAGGAGCGCACCATCTTCTTCAAGGACGA
CGGCAACTACAAGACCCGCGCCGAGGTGAAGTTCGAGGGCGACACCC
TGGTGAACCGCATCGAGCTGAAGGGCATCGACTTCAAGGAGGACGGC
AACATCCTGGGGCACAAGCTGGAGTACAACTACAACAGCCACAACGT
CTATATCATGGCCGACAAGCAGAAGAACGGCATCAAGGTGAACTTCA
AGATCCGCCACAACATCGAGGACGGCAGCGTGCAGCTCGCCGACCAC
TACCAGCAGAACACCCCCATCGGCGACGGCCCCGTGCTGCTGCCCGA
CAACCACTACCTGAGCACCCAGTCCGCCCTGAGCAAAGACCCCAACG
AGAAGCGCGATCACATGGTCCTGCTGGAGTTCGTGACCGCCGCCGGG
ATCACTCTCGGCATGGACGAGCTGTACAAGTAAcctgcaggcgccgg
cgGAAACAGATTGGAAATGATTTGTTTTGAGCGGGGGTTGAGAATCC
TGATGGAGCggGTTTGTCATAAACCccGCTCCCTCAGGATTCCCAAC
CTCCTCTCATTTGCTATATTCAATTAAGTAAGAGCTCGCTGATCAGC
CTCGACTGTGCCTTCTAGTTGCCAGCCATCTGTTGTTTGCCCCTCCC
CCGTGCCTTCCTTGACCCTGGAAGGTGCCACTCCCACTGTCCTTTCC
TAATAAAATGAGGAAATTGCATCGCATTGTCTGAGTAGGTGTCATTC
TATTCTGGGGGGTGGGGTGGGGCAGGACAGCAAGGGGGAGGATTGGG
AAGACAATAGCAGGCATGCTGGGGATGCGGTGGGCTCTATGGAAGCT
TGAATTCAGCTGACGTGCCTCGGACCGCTAGGAACCCCTAGTGATGG
AGTTGGCCACTCCCTCTCTGCGCGCTCGCTCGCTCACTGAGGCCGGG
CGACCAAAGGTCGCCCGACGCCCGGGCTTTGCCCGGGCGGCCTCAGT
GAGCGAGCGAGCGCGCAG
Exemplary pITR.CAG.miR1-451_EGFP
sequence
(SEQ ID NO: 221)
CTGCGCGCTCGCTCGCTCACTGAGGCCGCCCGGGCGTCGGGCGACCT
TTGGTCGCCCGGCCTCAGTGAGCGAGCGAGCGCGCAGAGAGGGAGTG
GCCAACTCCATCACTAGGGGTTCCTGCGGCCGCACGCGTGACATTGA
TTATTGACTAGTTATTAATAGTAATCAATTACGGGGTCATTAGTTCA
TAGCCCATATATGGAGTTCCGCGTTACATAACTTACGGTAAATGGCC
CGCCTGGCTGACCGCCCAACGACCCCCGCCCATTGACGTCAATAATG
ACGTATGTTCCCATAGTAACGCCAATAGGGACTTTCCATTGACGTCA
ATGGGTGGACTATTTACGGTAAACTGCCCACTTGGCAGTACATCAAG
TGTATCATATGCCAAGTACGCCCCCTATTGACGTCAATGACGGTAAA
TGGCCCGCCTGGCATTATGCCCAGTACATGACCTTATGGGACTTTCC
TACTTGGCAGTACATCTACGTATTAGTCATCGCTATTACCATGGGTC
GAGGTGAGCCCCACGTTCTGCTTCACTCTCCCCATCTCCCCCCCCTC
CCCACCCCCAATTTTGTATTTATTTATTTTTTAATTATTTTGTGCAG
CGATGGGGGCGGGGGGGGGGGGGGCGCGCGCCAGGCGGGGCGGGGCG
GGGCGAGGGGCGGGGCGGGGCGAGGCGGAGAGGTGCGGCGGCAGCCA
ATCAGAGCGGCGCGCTCCGAAAGTTTCCTTTTATGGCGAGGCGGCGG
CGGCGGCGGCCCTATAAAAAGCGAAGCGCGCGGCGGGCGGGAGTCGC
TGCGTTGCCTTCGCCCCGTGCCCCGCTCCGCGCCGCCTCGCGCCGCC
CGCCCCGGCTCTGACTGACCGCGTTACTCCCACAGGTGAGCGGGCGG
GACGGCCCTTCTCCTCCGGGCTGTAATTAGCGCTTGGTTTAATGACG
GCTCGTTTCTTTTCTGTGGCTGCGTGAAAGCCTTAAAGGGCTCCGGG
AGGGCCCTTTGTGCGGGGGGGAGCGGCTCGGGGGGTGCGTGCGTGTG
TGTGTGCGTGGGGAGCGCCGCGTGCGGCCCGCGCTGCCCGGCGGCTG
TGAGCGCTGCGGGCGCGGCGCGGGGCTTTGTGCGCTCCGCGTGTGCG
CGAGGGGAGCGCGGCCGGGGGCGGTGCCCCGCGGTGCGGGGGGGCTG
CGAGGGGAACAAAGGCTGCGTGCGGGGTGTGTGCGTGGGGGGGTGAG
CAGGGGGTGTGGGCGCGGCGGTCGGGCTGTAACCCCCCCCTGCACCC
CCCTCCCCGAGTTGCTGAGCACGGCCCGGCTTCGGGTGCGGGGCTCC
GTGCGGGGCGTGGCGCGGGGCTCGCCGTGCCGGGCGGGGGGTGGCGG
CAGGTGGGGGTGCCGGGCGGGGCGGGGCCGCCTCGGGCCGGGGAGGG
CTCGGGGGAGGGGCGCGGCGGCCCCCGGAGCGCCGGCGTGACTGCCA
GGGCACTTGGGAATGGCAAGGTTGAGAATCCTGATGGAGCGGATTCC
ATCAGGATTCTCAGTCTTGCTATACCCAGAAAACGTGCCAGGAAGAT
CTAGAGCCTCTGCTAACCATGTTCATGCCTTCTTCTTTTTCCTACAG
CTCCTGGGCAACGTGCTGGTTATTGTGACCGGTCGCTAGCCACCATG
GTGAGCAAGGGCGAGGAGCTGTTCACCGGGGTGGTGCCCATCCTGGT
CGAGCTGGACGGCGACGTAAACGGCCACAAGTTCAGCGTGTCCGGCG
AGGGCGAGGGCGATGCCACCTACGGCAAGCTGACCCTGAAGTTCATC
TGCACCACCGGCAAGCTGCCCGTGCCCTGGCCCACCCTCGTGACCAC
CCTGACCTACGGCGTGCAGTGCTTCAGCCGCTACCCCGACCACATGA
AGCAGCACGACTTCTTCAAGTCCGCCATGCCCGAAGGCTACGTCCAG
GAGCGCACCATCTTCTTCAAGGACGACGGCAACTACAAGACCCGCGC
CGAGGTGAAGTTCGAGGGCGACACCCTGGTGAACCGCATCGAGCTGA
AGGGCATCGACTTCAAGGAGGACGGCAACATCCTGGGGCACAAGCTG
GAGTACAACTACAACAGCCACAACGTCTATATCATGGCCGACAAGCA
GAAGAACGGCATCAAGGTGAACTTCAAGATCCGCCACAACATCGAGG
ACGGCAGCGTGCAGCTCGCCGACCACTACCAGCAGAACACCCCCATC
GGCGACGGCCCCGTGCTGCTGCCCGACAACCACTACCTGAGCACCCA
GTCCGCCCTGAGCAAAGACCCCAACGAGAAGCGCGATCACATGGTCC
TGCTGGAGTTCGTGACCGCCGCCGGGATCACTCTCGGCATGGACGAG
CTGTACAAGTAACCTGCAGGCGCCGGCGTGACTGCCAGGGCACTTGG
GAATGGCAAGGTTGAGAATCCTGATGGAGCGGATTCCATCAGGATTC
TCAGTCTTGCTATACCCAGAAAACGTGCCAGGAAGAGAGCTCGCTGA
TCAGCCTCGACTGTGCCTTCTAGTTGCCAGCCATCTGTTGTTTGCCC
CTCCCCCGTGCCTTCCTTGACCCTGGAAGGTGCCACTCCCACTGTCC
TTTCCTAATAAAATGAGGAAATTGCATCGCATTGTCTGAGTAGGTGT
CATTCTATTCTGGGGGGTGGGGTGGGGCAGGACAGCAAGGGGGAGGA
TTGGGAAGACAATAGCAGGCATGCTGGGGATGCGGTGGGCTCTATGG
AAGCTTGAATTCAGCTGACGTGCCTCGGACCGCTAGGAACCCCTAGT
GATGGAGTTGGCCACTCCCTCTCTGCGCGCTCGCTCGCTCACTGAGG
CCGGGCGACCAAAGGTCGCCCGACGCCCGGGCTTTGCCCGGGCGGCC
TCAGTGAGCGAGCGAGCGCGCAG
Exemplary pITR.CAG.miR 2NNNNN_eGFP
sequence
(SEQ ID NO: 222)
CTGCGCGCTCGCTCGCTCACTGAGGCCGCCCGGGCGTCGGGCGACCT
TTGGTCGCCCGGCCTCAGTGAGCGAGCGAGCGCGCAGAGAGGGAGTG
GCCAACTCCATCACTAGGGGTTCCTGCGGCCGCACGCGTGACATTGA
TTATTGACTAGTTATTAATAGTAATCAATTACGGGGTCATTAGTTCA
TAGCCCATATATGGAGTTCCGCGTTACATAACTTACGGTAAATGGCC
CGCCTGGCTGACCGCCCAACGACCCCCGCCCATTGACGTCAATAATG
ACGTATGTTCCCATAGTAACGCCAATAGGGACTTTCCATTGACGTCA
ATGGGTGGACTATTTACGGTAAACTGCCCACTTGGCAGTACATCAAG
TGTATCATATGCCAAGTACGCCCCCTATTGACGTCAATGACGGTAAA
TGGCCCGCCTGGCATTATGCCCAGTACATGACCTTATGGGACTTTCC
TACTTGGCAGTACATCTACGTATTAGTCATCGCTATTACCATGGGTC
GAGGTGAGCCCCACGTTCTGCTTCACTCTCCCCATCTCCCCCCCCTC
CCCACCCCCAATTTTGTATTTATTTATTTTTTAATTATTTTGTGCAG
CGATGGGGGCGGGGGGGGGGGGGGCGCGCGCCAGGCGGGGCGGGGCG
GGGCGAGGGGCGGGGCGGGGCGAGGCGGAGAGGTGCGGCGGCAGCCA
ATCAGAGCGGCGCGCTCCGAAAGTTTCCTTTTATGGCGAGGCGGCGG
CGGCGGCGGCCCTATAAAAAGCGAAGCGCGCGGCGGGCGGGAGTCGC
TGCGTTGCCTTCGCCCCGTGCCCCGCTCCGCGCCGCCTCGCGCCGCC
CGCCCCGGCTCTGACTGACCGCGTTACTCCCACAGGTGAGCGGGCGG
GACGGCCCTTCTCCTCCGGGCTGTAATTAGCGCTTGGTTTAATGACG
GCTCGTTTCTTTTCTGTGGCTGCGTGAAAGCCTTAAAGGGCTCCGGG
AGGGCCCTTTGTGCGGGGGGGAGCGGCTCGGGGGGTGCGTGCGTGTG
TGTGTGCGTGGGGAGCGCCGCGTGCGGCCCGCGCTGCCCGGCGGCTG
TGAGCGCTGCGGGCGCGGCGCGGGGCTTTGTGCGCTCCGCGTGTGCG
CGAGGGGAGCGCGGCCGGGGGCGGTGCCCCGCGGTGCGGGGGGGCTG
CGAGGGGAACAAAGGCTGCGTGCGGGGTGTGTGCGTGGGGGGGTGAG
CAGGGGGTGTGGGCGCGGCGGTCGGGCTGTAACCCCCCCCTGCACCC
CCCTCCCCGAGTTGCTGAGCACGGCCCGGCTTCGGGTGCGGGGCTCC
GTGCGGGGCGTGGCGCGGGGCTCGCCGTGCCGGGCGGGGGGTGGCGG
CAGGTGGGGGTGCCGGGCGGGGCGGGGCCGCCTCGGGCCGGGGAGGG
CTCGGGGGAGGGGCGCGGCGGCCCCCGGAGCGCCGGCGNNNNNTCTA
GAGCCTCTGCTAACCATGTTCATGCCTTCTTCTTTTTCCTACAGCTC
CTGGGCAACGTGCTGGTTATTGTGACCGGTCGCTAGCCACCATGGTG
AGCAAGGGCGAGGAGCTGTTCACCGGGGTGGTGCCCATCCTGGTCGA
GCTGGACGGCGACGTAAACGGCCACAAGTTCAGCGTGTCCGGCGAGG
GCGAGGGCGATGCCACCTACGGCAAGCTGACCCTGAAGTTCATCTGC
ACCACCGGCAAGCTGCCCGTGCCCTGGCCCACCCTCGTGACCACCCT
GACCTACGGCGTGCAGTGCTTCAGCCGCTACCCCGACCACATGAAGC
AGCACGACTTCTTCAAGTCCGCCATGCCCGAAGGCTACGTCCAGGAG
CGCACCATCTTCTTCAAGGACGACGGCAACTACAAGACCCGCGCCGA
GGTGAAGTTCGAGGGCGACACCCTGGTGAACCGCATCGAGCTGAAGG
GCATCGACTTCAAGGAGGACGGCAACATCCTGGGGCACAAGCTGGAG
TACAACTACAACAGCCACAACGTCTATATCATGGCCGACAAGCAGAA
GAACGGCATCAAGGTGAACTTCAAGATCCGCCACAACATCGAGGACG
GCAGCGTGCAGCTCGCCGACCACTACCAGCAGAACACCCCCATCGGC
GACGGCCCCGTGCTGCTGCCCGACAACCACTACCTGAGCACCCAGTC
CGCCCTGAGCAAAGACCCCAACGAGAAGCGCGATCACATGGTCCTGC
TGGAGTTCGTGACCGCCGCCGGGATCACTCTCGGCATGGACGAGCTG
TACAAGTAACCTGCAGGCGCCGGCGNNNNNGAGCTCGCTGATCAGCC
TCGACTGTGCCTTCTAGTTGCCAGCCATCTGTTGTTTGCCCCTCCCC
CGTGCCTTCCTTGACCCTGGAAGGTGCCACTCCCACTGTCCTTTCCT
AATAAAATGAGGAAATTGCATCGCATTGTCTGAGTAGGTGTCATTCT
ATTCTGGGGGGTGGGGTGGGGCAGGACAGCAAGGGGGAGGATTGGGA
AGACAATAGCAGGCATGCTGGGGATGCGGTGGGCTCTATGGAAGCTT
GAATTCAGCTGACGTGCCTCGGACCGCTAGGAACCCCTAGTGATGGA
GTTGGCCACTCCCTCTCTGCGCGCTCGCTCGCTCACTGAGGCCGGGC
GACCAAAGGTCGCCCGACGCCCGGGCTTTGCCCGGGCGGCCTCAGTG
AGCGAGCGAGCGCGCAG
Exemplary pITR.CAG.miR_5NNNNN_eGFP
sequence
(SEQ ID NO: 223)
CTGCGCGCTCGCTCGCTCACTGAGGCCGCCCGGGCGTCGGGCGACCT
TTGGTCGCCCGGCCTCAGTGAGCGAGCGAGCGCGCAGAGAGGGAGTG
GCCAACTCCATCACTAGGGGTTCCTGCGGCCGCACGCGTGACATTGA
TTATTGACTAGTTATTAATAGTAATCAATTACGGGGTCATTAGTTCA
TAGCCCATATATGGAGTTCCGCGTTACATAACTTACGGTAAATGGCC
CGCCTGGCTGACCGCCCAACGACCCCCGCCCATTGACGTCAATAATG
ACGTATGTTCCCATAGTAACGCCAATAGGGACTTTCCATTGACGTCA
ATGGGTGGACTATTTACGGTAAACTGCCCACTTGGCAGTACATCAAG
TGTATCATATGCCAAGTACGCCCCCTATTGACGTCAATGACGGTAAA
TGGCCCGCCTGGCATTATGCCCAGTACATGACCTTATGGGACTTTCC
TACTTGGCAGTACATCTACGTATTAGTCATCGCTATTACCATGGGTC
GAGGTGAGCCCCACGTTCTGCTTCACTCTCCCCATCTCCCCCCCCTC
CCCACCCCCAATTTTGTATTTATTTATTTTTTAATTATTTTGTGCAG
CGATGGGGGCGGGGGGGGGGGGGGCGCGCGCCAGGCGGGGCGGGGCG
GGGCGAGGGGCGGGGCGGGGCGAGGCGGAGAGGTGCGGCGGCAGCCA
ATCAGAGCGGCGCGCTCCGAAAGTTTCCTTTTATGGCGAGGCGGCGG
CGGCGGCGGCCCTATAAAAAGCGAAGCGCGCGGCGGGCGGGAGTCGC
TGCGTTGCCTTCGCCCCGTGCCCCGCTCCGCGCCGCCTCGCGCCGCC
CGCCCCGGCTCTGACTGACCGCGTTACTCCCACAGGTGAGCGGGCGG
GACGGCCCTTCTCCTCCGGGCTGTAATTAGCGCTTGGTTTAATGACG
GCTCGTTTCTTTTCTGTGGCTGCGTGAAAGCCTTAAAGGGCTCCGGG
AGGGCCCTTTGTGCGGGGGGGAGCGGCTCGGGGGGTGCGTGCGTGTG
TGTGTGCGTGGGGAGCGCCGCGTGCGGCCCGCGCTGCCCGGCGGCTG
TGAGCGCTGCGGGCGCGGCGCGGGGCTTTGTGCGCTCCGCGTGTGCG
CGAGGGGAGCGCGGCCGGGGGCGGTGCCCCGCGGTGCGGGGGGGCTG
CGAGGGGAACAAAGGCTGCGTGCGGGGTGTGTGCGTGGGGGGGTGAG
CAGGGGGTGTGGGCGCGGCGGTCGGGCTGTAACCCCCCCCTGCACCC
CCCTCCCCGAGTTGCTGAGCACGGCCCGGCTTCGGGTGCGGGGCTCC
GTGCGGGGCGTGGCGCGGGGCTCGCCGTGCCGGGCGGGGGGTGGCGG
CAGGTGGGGGTGCCGGGCGGGGCGGGGCCGCCTCGGGCCGGGGAGGG
CTCGGGGGAGGGGCGCGGCGGCCCCCGGAGCGCCGGCGNNNNNTCTA
GAGCCTCTGCTAACCATGTTCATGCCTTCTTCTTTTTCCTACAGCTC
CTGGGCAACGTGCTGGTTATTGTGACCGGTCGCTAGCCACCATGGTG
AGCAAGGGCGAGGAGCTGTTCACCGGGGTGGTGCCCATCCTGGTCGA
GCTGGACGGCGACGTAAACGGCCACAAGTTCAGCGTGTCCGGCGAGG
GCGAGGGCGATGCCACCTACGGCAAGCTGACCCTGAAGTTCATCTGC
ACCACCGGCAAGCTGCCCGTGCCCTGGCCCACCCTCGTGACCACCCT
GACCTACGGCGTGCAGTGCTTCAGCCGCTACCCCGACCACATGAAGC
AGCACGACTTCTTCAAGTCCGCCATGCCCGAAGGCTACGTCCAGGAG
CGCACCATCTTCTTCAAGGACGACGGCAACTACAAGACCCGCGCCGA
GGTGAAGTTCGAGGGCGACACCCTGGTGAACCGCATCGAGCTGAAGG
GCATCGACTTCAAGGAGGACGGCAACATCCTGGGGCACAAGCTGGAG
TACAACTACAACAGCCACAACGTCTATATCATGGCCGACAAGCAGAA
GAACGGCATCAAGGTGAACTTCAAGATCCGCCACAACATCGAGGACG
GCAGCGTGCAGCTCGCCGACCACTACCAGCAGAACACCCCCATCGGC
GACGGCCCCGTGCTGCTGCCCGACAACCACTACCTGAGCACCCAGTC
CGCCCTGAGCAAAGACCCCAACGAGAAGCGCGATCACATGGTCCTGC
TGGAGTTCGTGACCGCCGCCGGGATCACTCTCGGCATGGACGAGCTG
TACAAGTAAGAGCTCGCTGATCAGCCTCGACTGTGCCTTCTAGTTGC
CAGCCATCTGTTGTTTGCCCCTCCCCCGTGCCTTCCTTGACCCTGGA
AGGTGCCACTCCCACTGTCCTTTCCTAATAAAATGAGGAAATTGCAT
CGCATTGTCTGAGTAGGTGTCATTCTATTCTGGGGGGTGGGGTGGGG
CAGGACAGCAAGGGGGAGGATTGGGAAGACAATAGCAGGCATGCTGG
GGATGCGGTGGGCTCTATGGAAGCTTGAATTCAGCTGACGTGCCTCG
GACCGCTAGGAACCCCTAGTGATGGAGTTGGCCACTCCCTCTCTGCG
CGCTCGCTCGCTCACTGAGGCCGGGCGACCAAAGGTCGCCCGACGCC
CGGGCTTTGCCCGGGCGGCCTCAGTGAGCGAGCGAGCGCGCAG
Exemplary pITR.CAG.miR 3′NNNNN_eGFP
sequence
(SEQ ID NO: 224)
CTGCGCGCTCGCTCGCTCACTGAGGCCGCCCGGGCGTCGGGCGACCT
TTGGTCGCCCGGCCTCAGTGAGCGAGCGAGCGCGCAGAGAGGGAGTG
GCCAACTCCATCACTAGGGGTTCCTGCGGCCGCACGCGTGACATTGA
TTATTGACTAGTTATTAATAGTAATCAATTACGGGGTCATTAGTTCA
TAGCCCATATATGGAGTTCCGCGTTACATAACTTACGGTAAATGGCC
CGCCTGGCTGACCGCCCAACGACCCCCGCCCATTGACGTCAATAATG
ACGTATGTTCCCATAGTAACGCCAATAGGGACTTTCCATTGACGTCA
ATGGGTGGACTATTTACGGTAAACTGCCCACTTGGCAGTACATCAAG
TGTATCATATGCCAAGTACGCCCCCTATTGACGTCAATGACGGTAAA
TGGCCCGCCTGGCATTATGCCCAGTACATGACCTTATGGGACTTTCC
TACTTGGCAGTACATCTACGTATTAGTCATCGCTATTACCATGGGTC
GAGGTGAGCCCCACGTTCTGCTTCACTCTCCCCATCTCCCCCCCCTC
CCCACCCCCAATTTTGTATTTATTTATTTTTTAATTATTTTGTGCAG
CGATGGGGGCGGGGGGGGGGGGGGCGCGCGCCAGGCGGGGCGGGGCG
GGGCGAGGGGCGGGGCGGGGCGAGGCGGAGAGGTGCGGCGGCAGCCA
ATCAGAGCGGCGCGCTCCGAAAGTTTCCTTTTATGGCGAGGCGGCGG
CGGCGGCGGCCCTATAAAAAGCGAAGCGCGCGGCGGGCGGGAGTCGC
TGCGTTGCCTTCGCCCCGTGCCCCGCTCCGCGCCGCCTCGCGCCGCC
CGCCCCGGCTCTGACTGACCGCGTTACTCCCACAGGTGAGCGGGCGG
GACGGCCCTTCTCCTCCGGGCTGTAATTAGCGCTTGGTTTAATGACG
GCTCGTTTCTTTTCTGTGGCTGCGTGAAAGCCTTAAAGGGCTCCGGG
AGGGCCCTTTGTGCGGGGGGGAGCGGCTCGGGGGGTGCGTGCGTGTG
TGTGTGCGTGGGGAGCGCCGCGTGCGGCCCGCGCTGCCCGGCGGCTG
TGAGCGCTGCGGGCGCGGCGCGGGGCTTTGTGCGCTCCGCGTGTGCG
CGAGGGGAGCGCGGCCGGGGGCGGTGCCCCGCGGTGCGGGGGGGCTG
CGAGGGGAACAAAGGCTGCGTGCGGGGTGTGTGCGTGGGGGGGTGAG
CAGGGGGTGTGGGCGCGGCGGTCGGGCTGTAACCCCCCCCTGCACCC
CCCTCCCCGAGTTGCTGAGCACGGCCCGGCTTCGGGTGCGGGGCTCC
GTGCGGGGCGTGGCGCGGGGCTCGCCGTGCCGGGCGGGGGGTGGCGG
CAGGTGGGGGTGCCGGGCGGGGCGGGGCCGCCTCGGGCCGGGGAGGG
CTCGGGGGAGGGGCGCGGCGGCCCCCGGAGCGCCGGCGGCTGTCGAG
GCGCGGCGAGCCGCAGCCATTGCCTTTTATGGTAATCGTGCGAGAGG
GCGCAGGGACTTCCTTTGTCCCAAATCTGTGCGGAGCCGAAATCTGG
GAGGCGCCGCCGCACCCCCTCTAGCGGGCGCGGGGCGAAGCGGTGCG
GCGCCGGCAGGAAGGAAATGGGCGGGGAGGGCCTTCGTGCGTCGCCG
CGCCGCCGTCCCCTTCTCCCTCTCCAGCCTCGGGGCTGTCCGCGGGG
GGACGGCTGCCTTCGGGGGGGACGGGGCAGGGCGGGGTTCGGCTTCT
GGCGTGTGACCGGCGGCTCTAGAGCCTCTGCTAACCATGTTCATGCC
TTCTTCTTTTTCCTACAGCTCCTGGGCAACGTGCTGGTTATTGTGAC
CGGTCGCTAGCCACCATGGTGAGCAAGGGCGAGGAGCTGTTCACCGG
GGTGGTGCCCATCCTGGTCGAGCTGGACGGCGACGTAAACGGCCACA
AGTTCAGCGTGTCCGGCGAGGGCGAGGGCGATGCCACCTACGGCAAG
CTGACCCTGAAGTTCATCTGCACCACCGGCAAGCTGCCCGTGCCCTG
GCCCACCCTCGTGACCACCCTGACCTACGGCGTGCAGTGCTTCAGCC
GCTACCCCGACCACATGAAGCAGCACGACTTCTTCAAGTCCGCCATG
CCCGAAGGCTACGTCCAGGAGCGCACCATCTTCTTCAAGGACGACGG
CAACTACAAGACCCGCGCCGAGGTGAAGTTCGAGGGCGACACCCTGG
TGAACCGCATCGAGCTGAAGGGCATCGACTTCAAGGAGGACGGCAAC
ATCCTGGGGCACAAGCTGGAGTACAACTACAACAGCCACAACGTCTA
TATCATGGCCGACAAGCAGAAGAACGGCATCAAGGTGAACTTCAAGA
TCCGCCACAACATCGAGGACGGCAGCGTGCAGCTCGCCGACCACTAC
CAGCAGAACACCCCCATCGGCGACGGCCCCGTGCTGCTGCCCGACAA
CCACTACCTGAGCACCCAGTCCGCCCTGAGCAAAGACCCCAACGAGA
AGCGCGATCACATGGTCCTGCTGGAGTTCGTGACCGCCGCCGGGATC
ACTCTCGGCATGGACGAGCTGTACAAGTAANNNNNGAGCTCGCTGAT
CAGCCTCGACTGTGCCTTCTAGTTGCCAGCCATCTGTTGTTTGCCCC
TCCCCCGTGCCTTCCTTGACCCTGGAAGGTGCCACTCCCACTGTCCT
TTCCTAATAAAATGAGGAAATTGCATCGCATTGTCTGAGTAGGTGTC
ATTCTATTCTGGGGGGTGGGGTGGGGCAGGACAGCAAGGGGGAGGAT
TGGGAAGACAATAGCAGGCATGCTGGGGATGCGGTGGGCTCTATGGA
AGCTTGAATTCAGCTGACGTGCCTCGGACCGCTAGGAACCCCTAGTG
ATGGAGTTGGCCACTCCCTCTCTGCGCGCTCGCTCGCTCACTGAGGC
CGGGCGACCAAAGGTCGCCCGACGCCCGGGCTTTGCCCGGGCGGCCT
CAGTGAGCGAGCGAGCGCGCAG

[0367] Exemplary miRNA Construct Sequences (Part 3)

Exemplary pITR.CAG.miR1-155_EGFP sequence
(SEQ ID NO: 225)
CCTGCAGGCAGCTGCGCGCTCGCTCGCTCACTGAGGCCGCCCGGGCG
TCGGGCGACCTTTGGTCGCCCGGCCTCAGTGAGCGAGCGAGCGCGCA
GAGAGGGAGTGGCCAACTCCATCACTAGGGGTTCCTGCGGCCGCACG
CGTGACATTGATTATTGACTAGTTATTAATAGTAATCAATTACGGGG
TCATTAGTTCATAGCCCATATATGGAGTTCCGCGTTACATAACTTAC
GGTAAATGGCCCGCCTGGCTGACCGCCCAACGACCCCCGCCCATTGA
CGTCAATAATGACGTATGTTCCCATAGTAACGCCAATAGGGACTTTC
CATTGACGTCAATGGGTGGACTATTTACGGTAAACTGCCCACTTGGC
AGTACATCAAGTGTATCATATGCCAAGTACGCCCCCTATTGACGTCA
ATGACGGTAAATGGCCCGCCTGGCATTATGCCCAGTACATGACCTTA
TGGGACTTTCCTACTTGGCAGTACATCTACGTATTAGTCATCGCTAT
TACCATGGGTCGAGGTGAGCCCCACGTTCTGCTTCACTCTCCCCATC
TCCCCCCCCTCCCCACCCCCAATTTTGTATTTATTTATTTTTTAATT
ATTTTGTGCAGCGATGGGGGCGGGGGGGGGGGGGGCGCGCGCCAGGC
GGGGCGGGGCGGGGCGAGGGGCGGGGCGGGGCGAGGCGGAGAGGTGC
GGCGGCAGCCAATCAGAGCGGCGCGCTCCGAAAGTTTCCTTTTATGG
CGAGGCGGCGGCGGCGGCGGCCCTATAAAAAGCGAAGCGCGCGGCGG
GCGGGAGTCGCTGCGTTGCCTTCGCCCCGTGCCCCGCTCCGCGCCGC
CTCGCGCCGCCCGCCCCGGCTCTGACTGACCGCGTTACTCCCACAGG
TGAGCGGGCGGGACGGCCCTTCTCCTCCGGGCTGTAATTAGCGCTTG
GTTTAATGACGGCTCGTTTCTTTTCTGTGGCTGCGTGAAAGCCTTAA
AGGGCTCCGGGAGGGCCCTTTGTGCGGGGGGGAGCGGCTCGGGGGGT
GCGTGCGTGTGTGTGTGCGTGGGGAGCGCCGCGTGCGGCCCGCGCTG
CCCGGCGGCTGTGAGCGCTGCGGGCGCGGCGCGGGGCTTTGTGCGCT
CCGCGTGTGCGCGAGGGGAGCGCGGCCGGGGGCGGTGCCCCGCGGTG
CGGGGGGGCTGCGAGGGGAACAAAGGCTGCGTGCGGGGTGTGTGCGT
GGGGGGGTGAGCAGGGGGTGTGGGCGCGGCGGTCGGGCTGTAACCCC
CCCCTGCACCCCCCTCCCCGAGTTGCTGAGCACGGCCCGGCTTCGGG
TGCGGGGCTCCGTGCGGGGCGTGGCGCGGGGCTCGCCGTGCCGGGCG
GGGGGTGGCGGCAGGTGGGGGTGCCGGGCGGGGCGGGGCCGCCTCGG
GCCGGGGAGGGCTCGGGGGAGGGGCGCGGCGGCCCCCGGAGCGCCGG
CGTCCTCTGAGTGCTGAAGGCTTGCTGTAGGCTGTATGCTGTTGAGA
ATCCTGATGGAGCGGGTTTTTGCCTCCAACTGACCCGCTCATAGGAT
TCTCAACAGTGTATGATGCCTGTTACTAGCATTCACATGGATCTAGA
GCCTCTGCTAACCATGTTCATGCCTTCTTCTTTTTCCTACAGCTCCT
GGGCAACGTGCTGGTTATTGTGACCGGTCGCTAGCCACCATGGTGAG
CAAGGGCGAGGAGCTGTTCACCGGGGTGGTGCCCATCCTGGTCGAGC
TGGACGGCGACGTAAACGGCCACAAGTTCAGCGTGTCCGGCGAGGGC
GAGGGCGATGCCACCTACGGCAAGCTGACCCTGAAGTTCATCTGCAC
CACCGGCAAGCTGCCCGTGCCCTGGCCCACCCTCGTGACCACCCTGA
CCTACGGCGTGCAGTGCTTCAGCCGCTACCCCGACCACATGAAGCAG
CACGACTTCTTCAAGTCCGCCATGCCCGAAGGCTACGTCCAGGAGCG
CACCATCTTCTTCAAGGACGACGGCAACTACAAGACCCGCGCCGAGG
TGAAGTTCGAGGGCGACACCCTGGTGAACCGCATCGAGCTGAAGGGC
ATCGACTTCAAGGAGGACGGCAACATCCTGGGGCACAAGCTGGAGTA
CAACTACAACAGCCACAACGTCTATATCATGGCCGACAAGCAGAAGA
ACGGCATCAAGGTGAACTTCAAGATCCGCCACAACATCGAGGACGGC
AGCGTGCAGCTCGCCGACCACTACCAGCAGAACACCCCCATCGGCGA
CGGCCCCGTGCTGCTGCCCGACAACCACTACCTGAGCACCCAGTCCG
CCCTGAGCAAAGACCCCAACGAGAAGCGCGATCACATGGTCCTGCTG
GAGTTCGTGACCGCCGCCGGGATCACTCTCGGCATGGACGAGCTGTA
CAAGTAACCTGCAGGCGCCGGCGTCCTCTGAGTGCTGAAGGCTTGCT
GTAGGCTGTATGCTGTTGAGAATCCTGATGGAGCGGGTTTTTGCCTC
CAACTGACCCGCTCATAGGATTCTCAACAGTGTATGATGCCTGTTAC
TAGCATTCACATGGAGAGCTCGCTGATCAGCCTCGACTGTGCCTTCT
AGTTGCCAGCCATCTGTTGTTTGCCCCTCCCCCGTGCCTTCCTTGAC
CCTGGAAGGTGCCACTCCCACTGTCCTTTCCTAATAAAATGAGGAAA
TTGCATCGCATTGTCTGAGTAGGTGTCATTCTATTCTGGGGGGTGGG
GTGGGGCAGGACAGCAAGGGGGAGGATTGGGAAGACAATAGCAGGCA
TGCTGGGGATGCGGTGGGCTCTATGGAAGCTTGAATTCAGCTGACGT
GCCTCGGACCGCTAGGAACCCCTAGTGATGGAGTTGGCCACTCCCTC
TCTGCGCGCTCGCTCGCTCACTGAGGCCGGGCGACCAAAGGTCGCCC
GACGCCCGGGCTTTGCCCGGGCGGCCTCAGTGAGCGAGCGAGCGCGC
AG
Exemplary pITR.CAG.miR1i-155_EGFP sequence
(SEQ ID NO: 226)
CCTGCAGGCAGCTGCGCGCTCGCTCGCTCACTGAGGCCGCCCGGGCG
TCGGGCGACCTTTGGTCGCCCGGCCTCAGTGAGCGAGCGAGCGCGCA
GAGAGGGAGTGGCCAACTCCATCACTAGGGGTTCCTGCGGCCGCACG
CGTGACATTGATTATTGACTAGTTATTAATAGTAATCAATTACGGGG
TCATTAGTTCATAGCCCATATATGGAGTTCCGCGTTACATAACTTAC
GGTAAATGGCCCGCCTGGCTGACCGCCCAACGACCCCCGCCCATTGA
CGTCAATAATGACGTATGTTCCCATAGTAACGCCAATAGGGACTTTC
CATTGACGTCAATGGGTGGACTATTTACGGTAAACTGCCCACTTGGC
AGTACATCAAGTGTATCATATGCCAAGTACGCCCCCTATTGACGTCA
ATGACGGTAAATGGCCCGCCTGGCATTATGCCCAGTACATGACCTTA
TGGGACTTTCCTACTTGGCAGTACATCTACGTATTAGTCATCGCTAT
TACCATGGGTCGAGGTGAGCCCCACGTTCTGCTTCACTCTCCCCATC
TCCCCCCCCTCCCCACCCCCAATTTTGTATTTATTTATTTTTTAATT
ATTTTGTGCAGCGATGGGGGCGGGGGGGGGGGGGGCGCGCGCCAGGC
GGGGCGGGGCGGGGCGAGGGGCGGGGCGGGGCGAGGCGGAGAGGTGC
GGCGGCAGCCAATCAGAGCGGCGCGCTCCGAAAGTTTCCTTTTATGG
CGAGGCGGCGGCGGCGGCGGCCCTATAAAAAGCGAAGCGCGCGGCGG
GCGGGAGTCGCTGCGTTGCCTTCGCCCCGTGCCCCGCTCCGCGCCGC
CTCGCGCCGCCCGCCCCGGCTCTGACTGACCGCGTTACTCCCACAGG
TGAGCGGGCGGGACGGCCCTTCTCCTCCGGGCTGTAATTAGCGCTTG
GTTTAATGACGGCTCGTTTCTTTTCTGTGGCTGCGTGAAAGCCTTAA
AGGGCTCCGGGAGGGCCCTTTGTGCGGGGGGGAGCGGCTCGGGGGGT
GCGTGCGTGTGTGTGTGCGTGGGGAGCGCCGCGTGCGGCCCGCGCTG
CCCGGCGGCTGTGAGCGCTGCGGGCGCGGCGCGGGGCTTTGTGCGCT
CCGCGTGTGCGCGAGGGGAGCGCGGCCGGGGGCGGTGCCCCGCGGTG
CGGGGGGGCTGCGAGGGGAACAAAGGCTGCGTGCGGGGTGTGTGCGT
GGGGGGGTGAGCAGGGGGTGTGGGCGCGGCGGTCGGGCTGTAACCCC
CCCCTGCACCCCCCTCCCCGAGTTGCTGAGCACGGCCCGGCTTCGGG
TGCGGGGCTCCGTGCGGGGCGTGGCGCGGGGCTCGCCGTGCCGGGCG
GGGGGTGGCGGCAGGTGGGGGTGCCGGGCGGGGCGGGGCCGCCTCGG
GCCGGGGAGGGCTCGGGGGAGGGGCGCGGCGGCCCCCGGAGCGCCGG
CGTCCTCTGAGTGCTGAAGGCTTGCTGTAGGCTGTATGCTGTTGAGA
ATCCTGATGGAGCGGGTTTTTGCCTCCAACTGACCCGCTCATAGGAT
TCTCAACAGTGTATGATGCCTGTTACTAGCATTCACATGGATCTAGA
GCCTCTGCTAACCATGTTCATGCCTTCTTCTTTTTCCTACAGCTCCT
GGGCAACGTGCTGGTTATTGTGACCGGTCGCTAGCCACCATGGTGAG
CAAGGGCGAGGAGCTGTTCACCGGGGTGGTGCCCATCCTGGTCGAGC
TGGACGGCGACGTAAACGGCCACAAGTTCAGCGTGTCCGGCGAGGGC
GAGGGCGATGCCACCTACGGCAAGCTGACCCTGAAGTTCATCTGCAC
CACCGGCAAGCTGCCCGTGCCCTGGCCCACCCTCGTGACCACCCTGA
CCTACGGCGTGCAGTGCTTCAGCCGCTACCCCGACCACATGAAGCAG
CACGACTTCTTCAAGTCCGCCATGCCCGAAGGCTACGTCCAGGAGCG
CACCATCTTCTTCAAGGACGACGGCAACTACAAGACCCGCGCCGAGG
TGAAGTTCGAGGGCGACACCCTGGTGAACCGCATCGAGCTGAAGGGC
ATCGACTTCAAGGAGGACGGCAACATCCTGGGGCACAAGCTGGAGTA
CAACTACAACAGCCACAACGTCTATATCATGGCCGACAAGCAGAAGA
ACGGCATCAAGGTGAACTTCAAGATCCGCCACAACATCGAGGACGGC
AGCGTGCAGCTCGCCGACCACTACCAGCAGAACACCCCCATCGGCGA
CGGCCCCGTGCTGCTGCCCGACAACCACTACCTGAGCACCCAGTCCG
CCCTGAGCAAAGACCCCAACGAGAAGCGCGATCACATGGTCCTGCTG
GAGTTCGTGACCGCCGCCGGGATCACTCTCGGCATGGACGAGCTGTA
CAAGTAAGAGCTCGCTGATCAGCCTCGACTGTGCCTTCTAGTTGCCA
GCCATCTGTTGTTTGCCCCTCCCCCGTGCCTTCCTTGACCCTGGAAG
GTGCCACTCCCACTGTCCTTTCCTAATAAAATGAGGAAATTGCATCG
CATTGTCTGAGTAGGTGTCATTCTATTCTGGGGGGTGGGGTGGGGCA
GGACAGCAAGGGGGAGGATTGGGAAGACAATAGCAGGCATGCTGGGG
ATGCGGTGGGCTCTATGGAAGCTTGAATTCAGCTGACGTGCCTCGGA
CCGCTAGGAACCCCTAGTGATGGAGTTGGCCACTCCCTCTCTGCGCG
CTCGCTCGCTCACTGAGGCCGGGCGACCAAAGGTCGCCCGACGCCCG
GGCTTTGCCCGGGCGGCCTCAGTGAGCGAGCGAGCGCGCAG
Exemplary pITR.CAG.miR1u-155_EGFP sequence
(SEQ ID NO: 227)
CCTGCAGGCAGCTGCGCGCTCGCTCGCTCACTGAGGCCGCCCGGGCGT
CGGGCGACCTTTGGTCGCCCGGCCTCAGTGAGCGAGCGAGCGCGCAG
AGAGGGAGTGGCCAACTCCATCACTAGGGGTTCCTGCGGCCGCACGC
GTGACATTGATTATTGACTAGTTATTAATAGTAATCAATTACGGGGT
CATTAGTTCATAGCCCATATATGGAGTTCCGCGTTACATAACTTACG
GTAAATGGCCCGCCTGGCTGACCGCCCAACGACCCCCGCCCATTGAC
GTCAATAATGACGTATGTTCCCATAGTAACGCCAATAGGGACTTTCC
ATTGACGTCAATGGGTGGACTATTTACGGTAAACTGCCCACTTGGCA
GTACATCAAGTGTATCATATGCCAAGTACGCCCCCTATTGACGTCAA
TGACGGTAAATGGCCCGCCTGGCATTATGCCCAGTACATGACCTTAT
GGGACTTTCCTACTTGGCAGTACATCTACGTATTAGTCATCGCTATT
ACCATGGGTCGAGGTGAGCCCCACGTTCTGCTTCACTCTCCCCATCT
CCCCCCCCTCCCCACCCCCAATTTTGTATTTATTTATTTTTTAATTA
TTTTGTGCAGCGATGGGGGCGGGGGGGGGGGGGGCGCGCGCCAGGCG
GGGCGGGGCGGGGCGAGGGGCGGGGCGGGGCGAGGCGGAGAGGTGCG
GCGGCAGCCAATCAGAGCGGCGCGCTCCGAAAGTTTCCTTTTATGGC
GAGGCGGCGGCGGCGGCGGCCCTATAAAAAGCGAAGCGCGCGGCGGG
CGGGAGTCGCTGCGTTGCCTTCGCCCCGTGCCCCGCTCCGCGCCGCC
TCGCGCCGCCCGCCCCGGCTCTGACTGACCGCGTTACTCCCACAGGT
GAGCGGGCGGGACGGCCCTTCTCCTCCGGGCTGTAATTAGCGCTTGG
TTTAATGACGGCTCGTTTCTTTTCTGTGGCTGCGTGAAAGCCTTAAA
GGGCTCCGGGAGGGCCCTTTGTGCGGGGGGGAGCGGCTCGGGGGGTG
CGTGCGTGTGTGTGTGCGTGGGGAGCGCCGCGTGCGGCCCGCGCTGC
CCGGCGGCTGTGAGCGCTGCGGGCGCGGCGCGGGGCTTTGTGCGCTC
CGCGTGTGCGCGAGGGGAGCGCGGCCGGGGGCGGTGCCCCGCGGTGC
GGGGGGGCTGCGAGGGGAACAAAGGCTGCGTGCGGGGTGTGTGCGTG
GGGGGGTGAGCAGGGGGTGTGGGCGCGGCGGTCGGGCTGTAACCCCC
CCCTGCACCCCCCTCCCCGAGTTGCTGAGCACGGCCCGGCTTCGGGT
GCGGGGCTCCGTGCGGGGCGTGGCGCGGGGCTCGCCGTGCCGGGCGG
GGGGTGGCGGCAGGTGGGGGTGCCGGGCGGGGCGGGGCCGCCTCGGG
CCGGGGAGGGCTCGGGGGAGGGGCGCGGCGGCCCCCGGAGCGCCGGC
GGCTGTCGAGGCGCGGCGAGCCGCAGCCATTGCCTTTTATGGTAATC
GTGCGAGAGGGCGCAGGGACTTCCTTTGTCCCAAATCTGTGCGGAGC
CGAAATCTGGGAGGCGCCGCCGCACCCCCTCTAGCGGGCGCGGGGCG
AAGCGGTGCGGCGCCGGCAGGAAGGAAATGGGCGGGGAGGGCCTTCG
TGCGTCGCCGCGCCGCCGTCCCCTTCTCCCTCTCCAGCCTCGGGGCT
GTCCGCGGGGGGACGGCTGCCTTCGGGGGGGACGGGGCAGGGCGGGG
TTCGGCTTCTGGCGTGTGACCGGCGGCTCTAGAGCCTCTGCTAACCA
TGTTCATGCCTTCTTCTTTTTCCTACAGCTCCTGGGCAACGTGCTGG
TTATTGTGACCGGTCGCTAGCCACCATGGTGAGCAAGGGCGAGGAGC
TGTTCACCGGGGTGGTGCCCATCCTGGTCGAGCTGGACGGCGACGTA
AACGGCCACAAGTTCAGCGTGTCCGGCGAGGGCGAGGGCGATGCCAC
CTACGGCAAGCTGACCCTGAAGTTCATCTGCACCACCGGCAAGCTGC
CCGTGCCCTGGCCCACCCTCGTGACCACCCTGACCTACGGCGTGCAG
TGCTTCAGCCGCTACCCCGACCACATGAAGCAGCACGACTTCTTCAA
GTCCGCCATGCCCGAAGGCTACGTCCAGGAGCGCACCATCTTCTTCA
AGGACGACGGCAACTACAAGACCCGCGCCGAGGTGAAGTTCGAGGGC
GACACCCTGGTGAACCGCATCGAGCTGAAGGGCATCGACTTCAAGGA
GGACGGCAACATCCTGGGGCACAAGCTGGAGTACAACTACAACAGCC
ACAACGTCTATATCATGGCCGACAAGCAGAAGAACGGCATCAAGGTG
AACTTCAAGATCCGCCACAACATCGAGGACGGCAGCGTGCAGCTCGC
CGACCACTACCAGCAGAACACCCCCATCGGCGACGGCCCCGTGCTGC
TGCCCGACAACCACTACCTGAGCACCCAGTCCGCCCTGAGCAAAGAC
CCCAACGAGAAGCGCGATCACATGGTCCTGCTGGAGTTCGTGACCGC
CGCCGGGATCACTCTCGGCATGGACGAGCTGTACAAGTAACCTGCAG
GCGCCGGCGTCCTCTGAGTGCTGAAGGCTTGCTGTAGGCTGTATGCT
GTTGAGAATCCTGATGGAGCGGGTTTTTGCCTCCAACTGACCCGCTC
ATAGGATTCTCAACAGTGTATGATGCCTGTTACTAGCATTCACATGG
AGAGCTCGCTGATCAGCCTCGACTGTGCCTTCTAGTTGCCAGCCATC
TGTTGTTTGCCCCTCCCCCGTGCCTTCCTTGACCCTGGAAGGTGCCA
CTCCCACTGTCCTTTCCTAATAAAATGAGGAAATTGCATCGCATTGT
CTGAGTAGGTGTCATTCTATTCTGGGGGGTGGGGTGGGGCAGGACAG
CAAGGGGGAGGATTGGGAAGACAATAGCAGGCATGCTGGGGATGCGG
TGGGCTCTATGGAAGCTTGAATTCAGCTGACGTGCCTCGGACCGCTA
GGAACCCCTAGTGATGGAGTTGGCCACTCCCTCTCTGCGCGCTCGCT
CGCTCACTGAGGCCGGGCGACCAAAGGTCGCCCGACGCCCGGGCTTT
GCCCGGGCGGCCTCAGTGAGCGAGCGAGCGCGCAG
Exemplary pITR.CAG.miR2-155_EGFP sequence
(SEQ ID NO: 228)
CCTGCAGGCAGCTGCGCGCTCGCTCGCTCACTGAGGCCGCCCGGGCG
TCGGGCGACCTTTGGTCGCCCGGCCTCAGTGAGCGAGCGAGCGCGCA
GAGAGGGAGTGGCCAACTCCATCACTAGGGGTTCCTGCGGCCGCACG
CGTGACATTGATTATTGACTAGTTATTAATAGTAATCAATTACGGGG
TCATTAGTTCATAGCCCATATATGGAGTTCCGCGTTACATAACTTAC
GGTAAATGGCCCGCCTGGCTGACCGCCCAACGACCCCCGCCCATTGA
CGTCAATAATGACGTATGTTCCCATAGTAACGCCAATAGGGACTTTC
CATTGACGTCAATGGGTGGACTATTTACGGTAAACTGCCCACTTGGC
AGTACATCAAGTGTATCATATGCCAAGTACGCCCCCTATTGACGTCA
ATGACGGTAAATGGCCCGCCTGGCATTATGCCCAGTACATGACCTTA
TGGGACTTTCCTACTTGGCAGTACATCTACGTATTAGTCATCGCTAT
TACCATGGGTCGAGGTGAGCCCCACGTTCTGCTTCACTCTCCCCATC
TCCCCCCCCTCCCCACCCCCAATTTTGTATTTATTTATTTTTTAATT
ATTTTGTGCAGCGATGGGGGCGGGGGGGGGGGGGGCGCGCGCCAGGC
GGGGCGGGGCGGGGCGAGGGGCGGGGCGGGGCGAGGCGGAGAGGTGC
GGCGGCAGCCAATCAGAGCGGCGCGCTCCGAAAGTTTCCTTTTATGG
CGAGGCGGCGGCGGCGGCGGCCCTATAAAAAGCGAAGCGCGCGGCGG
GCGGGAGTCGCTGCGTTGCCTTCGCCCCGTGCCCCGCTCCGCGCCGC
CTCGCGCCGCCCGCCCCGGCTCTGACTGACCGCGTTACTCCCACAGG
TGAGCGGGCGGGACGGCCCTTCTCCTCCGGGCTGTAATTAGCGCTTG
GTTTAATGACGGCTCGTTTCTTTTCTGTGGCTGCGTGAAAGCCTTAA
AGGGCTCCGGGAGGGCCCTTTGTGCGGGGGGGAGCGGCTCGGGGGGT
GCGTGCGTGTGTGTGTGCGTGGGGAGCGCCGCGTGCGGCCCGCGCTG
CCCGGCGGCTGTGAGCGCTGCGGGCGCGGCGCGGGGCTTTGTGCGCT
CCGCGTGTGCGCGAGGGGAGCGCGGCCGGGGGCGGTGCCCCGCGGTG
CGGGGGGGCTGCGAGGGGAACAAAGGCTGCGTGCGGGGTGTGTGCGT
GGGGGGGTGAGCAGGGGGTGTGGGCGCGGCGGTCGGGCTGTAACCCC
CCCCTGCACCCCCCTCCCCGAGTTGCTGAGCACGGCCCGGCTTCGGG
TGCGGGGCTCCGTGCGGGGCGTGGCGCGGGGCTCGCCGTGCCGGGCG
GGGGGTGGCGGCAGGTGGGGGTGCCGGGCGGGGCGGGGCCGCCTCGG
GCCGGGGAGGGCTCGGGGGAGGGGCGCGGCGGCCCCCGGAGCGCCGG
CGTCCTCTGAGTGCTGAAGGCTTGCTGTAGGCTGTATGCTGTTGAGT
CTCAGAGATGCCCGGGTTTTTGCCTCCAACTGACTCGGGATTCTGAG
ACTCAACAGTGTATGATGCCTGTTACTAGCATTCACATGGATCTAGA
GCCTCTGCTAACCATGTTCATGCCTTCTTCTTTTTCCTACAGCTCCT
GGGCAACGTGCTGGTTATTGTGACCGGTCGCTAGCCACCATGGTGAG
CAAGGGCGAGGAGCTGTTCACCGGGGTGGTGCCCATCCTGGTCGAGC
TGGACGGCGACGTAAACGGCCACAAGTTCAGCGTGTCCGGCGAGGGC
GAGGGCGATGCCACCTACGGCAAGCTGACCCTGAAGTTCATCTGCAC
CACCGGCAAGCTGCCCGTGCCCTGGCCCACCCTCGTGACCACCCTGA
CCTACGGCGTGCAGTGCTTCAGCCGCTACCCCGACCACATGAAGCAG
CACGACTTCTTCAAGTCCGCCATGCCCGAAGGCTACGTCCAGGAGCG
CACCATCTTCTTCAAGGACGACGGCAACTACAAGACCCGCGCCGAGG
TGAAGTTCGAGGGCGACACCCTGGTGAACCGCATCGAGCTGAAGGGC
ATCGACTTCAAGGAGGACGGCAACATCCTGGGGCACAAGCTGGAGTA
CAACTACAACAGCCACAACGTCTATATCATGGCCGACAAGCAGAAGA
ACGGCATCAAGGTGAACTTCAAGATCCGCCACAACATCGAGGACGGC
AGCGTGCAGCTCGCCGACCACTACCAGCAGAACACCCCCATCGGCGA
CGGCCCCGTGCTGCTGCCCGACAACCACTACCTGAGCACCCAGTCCG
CCCTGAGCAAAGACCCCAACGAGAAGCGCGATCACATGGTCCTGCTG
GAGTTCGTGACCGCCGCCGGGATCACTCTCGGCATGGACGAGCTGTA
CAAGTAACCTGCAGGCGCCGGCGTCCTCTGAGTGCTGAAGGCTTGCT
GTAGGCTGTATGCTGTTGAGTCTCAGAGATGCCCGGGTTTTTGCCTC
CAACTGACTCGGGATTCTGAGACTCAACAGTGTATGATGCCTGTTAC
TAGCATTCACATGGAGAGCTCGCTGATCAGCCTCGACTGTGCCTTCT
AGTTGCCAGCCATCTGTTGTTTGCCCCTCCCCCGTGCCTTCCTTGAC
CCTGGAAGGTGCCACTCCCACTGTCCTTTCCTAATAAAATGAGGAAA
TTGCATCGCATTGTCTGAGTAGGTGTCATTCTATTCTGGGGGGTGGG
GTGGGGCAGGACAGCAAGGGGGAGGATTGGGAAGACAATAGCAGGCA
TGCTGGGGATGCGGTGGGCTCTATGGAAGCTTGAATTCAGCTGACGT
GCCTCGGACCGCTAGGAACCCCTAGTGATGGAGTTGGCCACTCCCTC
TCTGCGCGCTCGCTCGCTCACTGAGGCCGGGCGACCAAAGGTCGCCC
GACGCCCGGGCTTTGCCCGGGCGGCCTCAGTGAGCGAGCGAGCGCGC
AG
Exemplary pITR.CAG.miR2v2-155_EGFP sequence
(SEQ ID NO: 229)
CCTGCAGGCAGCTGCGCGCTCGCTCGCTCACTGAGGCCGCCCGGGCG
TCGGGCGACCTTTGGTCGCCCGGCCTCAGTGAGCGAGCGAGCGCGCA
GAGAGGGAGTGGCCAACTCCATCACTAGGGGTTCCTGCGGCCGCACG
CGTGACATTGATTATTGACTAGTTATTAATAGTAATCAATTACGGGG
TCATTAGTTCATAGCCCATATATGGAGTTCCGCGTTACATAACTTAC
GGTAAATGGCCCGCCTGGCTGACCGCCCAACGACCCCCGCCCATTGA
CGTCAATAATGACGTATGTTCCCATAGTAACGCCAATAGGGACTTTC
CATTGACGTCAATGGGTGGACTATTTACGGTAAACTGCCCACTTGGC
AGTACATCAAGTGTATCATATGCCAAGTACGCCCCCTATTGACGTCA
ATGACGGTAAATGGCCCGCCTGGCATTATGCCCAGTACATGACCTTA
TGGGACTTTCCTACTTGGCAGTACATCTACGTATTAGTCATCGCTAT
TACCATGGGTCGAGGTGAGCCCCACGTTCTGCTTCACTCTCCCCATC
TCCCCCCCCTCCCCACCCCCAATTTTGTATTTATTTATTTTTTAATT
ATTTTGTGCAGCGATGGGGGCGGGGGGGGGGGGGGCGCGCGCCAGGC
GGGGCGGGGCGGGGCGAGGGGCGGGGCGGGGCGAGGCGGAGAGGTGC
GGCGGCAGCCAATCAGAGCGGCGCGCTCCGAAAGTTTCCTTTTATGG
CGAGGCGGCGGCGGCGGCGGCCCTATAAAAAGCGAAGCGCGCGGCGG
GCGGGAGTCGCTGCGTTGCCTTCGCCCCGTGCCCCGCTCCGCGCCGC
CTCGCGCCGCCCGCCCCGGCTCTGACTGACCGCGTTACTCCCACAGG
TGAGCGGGCGGGACGGCCCTTCTCCTCCGGGCTGTAATTAGCGCTTG
GTTTAATGACGGCTCGTTTCTTTTCTGTGGCTGCGTGAAAGCCTTAA
AGGGCTCCGGGAGGGCCCTTTGTGCGGGGGGGAGCGGCTCGGGGGGT
GCGTGCGTGTGTGTGTGCGTGGGGAGCGCCGCGTGCGGCCCGCGCTG
CCCGGCGGCTGTGAGCGCTGCGGGCGCGGCGCGGGGCTTTGTGCGCT
CCGCGTGTGCGCGAGGGGAGCGCGGCCGGGGGCGGTGCCCCGCGGTG
CGGGGGGGCTGCGAGGGGAACAAAGGCTGCGTGCGGGGTGTGTGCGT
GGGGGGGTGAGCAGGGGGTGTGGGCGCGGCGGTCGGGCTGTAACCCC
CCCCTGCACCCCCCTCCCCGAGTTGCTGAGCACGGCCCGGCTTCGGG
TGCGGGGCTCCGTGCGGGGCGTGGCGCGGGGCTCGCCGTGCCGGGCG
GGGGGTGGCGGCAGGTGGGGGTGCCGGGCGGGGCGGGGCCGCCTCGG
GCCGGGGAGGGCTCGGGGGAGGGGCGCGGCGGCCCCCGGAGCGCCGG
CGTCCTCTGAGTGCTGAAGGCTTGCTGTAGGCTGTATGCTGTTGAGT
CTCAGAGATGCCCGGGTTTTTGCCTCCAACTGACTCGGGATTCTGAG
ATTCAACAGTGTATGATGCCTGTTACTAGCATTCACATGGATCTAGA
GCCTCTGCTAACCATGTTCATGCCTTCTTCTTTTTCCTACAGCTCCT
GGGCAACGTGCTGGTTATTGTGACCGGTCGCTAGCCACCATGGTGAG
CAAGGGCGAGGAGCTGTTCACCGGGGTGGTGCCCATCCTGGTCGAGC
TGGACGGCGACGTAAACGGCCACAAGTTCAGCGTGTCCGGCGAGGGC
GAGGGCGATGCCACCTACGGCAAGCTGACCCTGAAGTTCATCTGCAC
CACCGGCAAGCTGCCCGTGCCCTGGCCCACCCTCGTGACCACCCTGA
CCTACGGCGTGCAGTGCTTCAGCCGCTACCCCGACCACATGAAGCAG
CACGACTTCTTCAAGTCCGCCATGCCCGAAGGCTACGTCCAGGAGCG
CACCATCTTCTTCAAGGACGACGGCAACTACAAGACCCGCGCCGAGG
TGAAGTTCGAGGGCGACACCCTGGTGAACCGCATCGAGCTGAAGGGC
ATCGACTTCAAGGAGGACGGCAACATCCTGGGGCACAAGCTGGAGTA
CAACTACAACAGCCACAACGTCTATATCATGGCCGACAAGCAGAAGA
ACGGCATCAAGGTGAACTTCAAGATCCGCCACAACATCGAGGACGGC
AGCGTGCAGCTCGCCGACCACTACCAGCAGAACACCCCCATCGGCGA
CGGCCCCGTGCTGCTGCCCGACAACCACTACCTGAGCACCCAGTCCG
CCCTGAGCAAAGACCCCAACGAGAAGCGCGATCACATGGTCCTGCTG
GAGTTCGTGACCGCCGCCGGGATCACTCTCGGCATGGACGAGCTGTA
CAAGTAACCTGCAGGCGCCGGCGTCCTCTGAGTGCTGAAGGCTTGCT
GTAGGCTGTATGCTGTTGAGTCTCAGAGATGCCCGGGTTTTTGCCTC
CAACTGACTCGGGATTCTGAGATTCAACAGTGTATGATGCCTGTTAC
TAGCATTCACATGGAGAGCTCGCTGATCAGCCTCGACTGTGCCTTCT
AGTTGCCAGCCATCTGTTGTTTGCCCCTCCCCCGTGCCTTCCTTGAC
CCTGGAAGGTGCCACTCCCACTGTCCTTTCCTAATAAAATGAGGAAA
TTGCATCGCATTGTCTGAGTAGGTGTCATTCTATTCTGGGGGGTGGG
GTGGGGCAGGACAGCAAGGGGGAGGATTGGGAAGACAATAGCAGGCA
TGCTGGGGATGCGGTGGGCTCTATGGAAGCTTGAATTCAGCTGACGT
GCCTCGGACCGCTAGGAACCCCTAGTGATGGAGTTGGCCACTCCCTC
TCTGCGCGCTCGCTCGCTCACTGAGGCCGGGCGACCAAAGGTCGCCC
GACGCCCGGGCTTTGCCCGGGCGGCCTCAGTGAGCGAGCGAGCGCGC
AG
Exemplary pITR.CAG.miR2v3-155_EGFP sequence
(SEQ ID NO: 230)
CCTGCAGGCAGCTGCGCGCTCGCTCGCTCACTGAGGCCGCCCGGGCG
TCGGGCGACCTTTGGTCGCCCGGCCTCAGTGAGCGAGCGAGCGCGCA
GAGAGGGAGTGGCCAACTCCATCACTAGGGGTTCCTGCGGCCGCACG
CGTGACATTGATTATTGACTAGTTATTAATAGTAATCAATTACGGGG
TCATTAGTTCATAGCCCATATATGGAGTTCCGCGTTACATAACTTAC
GGTAAATGGCCCGCCTGGCTGACCGCCCAACGACCCCCGCCCATTGA
CGTCAATAATGACGTATGTTCCCATAGTAACGCCAATAGGGACTTTC
CATTGACGTCAATGGGTGGACTATTTACGGTAAACTGCCCACTTGGC
AGTACATCAAGTGTATCATATGCCAAGTACGCCCCCTATTGACGTCA
ATGACGGTAAATGGCCCGCCTGGCATTATGCCCAGTACATGACCTTA
TGGGACTTTCCTACTTGGCAGTACATCTACGTATTAGTCATCGCTAT
TACCATGGGTCGAGGTGAGCCCCACGTTCTGCTTCACTCTCCCCATC
TCCCCCCCCTCCCCACCCCCAATTTTGTATTTATTTATTTTTTAATT
ATTTTGTGCAGCGATGGGGGCGGGGGGGGGGGGGGCGCGCGCCAGGC
GGGGCGGGGCGGGGCGAGGGGCGGGGCGGGGCGAGGCGGAGAGGTGC
GGCGGCAGCCAATCAGAGCGGCGCGCTCCGAAAGTTTCCTTTTATGG
CGAGGCGGCGGCGGCGGCGGCCCTATAAAAAGCGAAGCGCGCGGCGG
GCGGGAGTCGCTGCGTTGCCTTCGCCCCGTGCCCCGCTCCGCGCCGC
CTCGCGCCGCCCGCCCCGGCTCTGACTGACCGCGTTACTCCCACAGG
TGAGCGGGCGGGACGGCCCTTCTCCTCCGGGCTGTAATTAGCGCTTG
GTTTAATGACGGCTCGTTTCTTTTCTGTGGCTGCGTGAAAGCCTTAA
AGGGCTCCGGGAGGGCCCTTTGTGCGGGGGGGAGCGGCTCGGGGGGT
GCGTGCGTGTGTGTGTGCGTGGGGAGCGCCGCGTGCGGCCCGCGCTG
CCCGGCGGCTGTGAGCGCTGCGGGCGCGGCGCGGGGCTTTGTGCGCT
CCGCGTGTGCGCGAGGGGAGCGCGGCCGGGGGCGGTGCCCCGCGGTG
CGGGGGGGCTGCGAGGGGAACAAAGGCTGCGTGCGGGGTGTGTGCGT
GGGGGGGTGAGCAGGGGGTGTGGGCGCGGCGGTCGGGCTGTAACCCC
CCCCTGCACCCCCCTCCCCGAGTTGCTGAGCACGGCCCGGCTTCGGG
TGCGGGGCTCCGTGCGGGGCGTGGCGCGGGGCTCGCCGTGCCGGGCG
GGGGGTGGCGGCAGGTGGGGGTGCCGGGCGGGGCGGGGCCGCCTCGG
GCCGGGGAGGGCTCGGGGGAGGGGCGCGGCGGCCCCCGGAGCGCCGG
CGTCCTCTGAGTGCTGAAGGCTTGCTGTAGGCTGTATGCTGTTGAGT
CTCAGAGATGCCCGGGTTTTTGCCTCCAACTGACTCGGGATCCTGAG
ATTCAACAGTGTATGATGCCTGTTACTAGCATTCACATGGATCTAGA
GCCTCTGCTAACCATGTTCATGCCTTCTTCTTTTTCCTACAGCTCCT
GGGCAACGTGCTGGTTATTGTGACCGGTCGCTAGCCACCATGGTGAG
CAAGGGCGAGGAGCTGTTCACCGGGGTGGTGCCCATCCTGGTCGAGC
TGGACGGCGACGTAAACGGCCACAAGTTCAGCGTGTCCGGCGAGGGC
GAGGGCGATGCCACCTACGGCAAGCTGACCCTGAAGTTCATCTGCAC
CACCGGCAAGCTGCCCGTGCCCTGGCCCACCCTCGTGACCACCCTGA
CCTACGGCGTGCAGTGCTTCAGCCGCTACCCCGACCACATGAAGCAG
CACGACTTCTTCAAGTCCGCCATGCCCGAAGGCTACGTCCAGGAGCG
CACCATCTTCTTCAAGGACGACGGCAACTACAAGACCCGCGCCGAGG
TGAAGTTCGAGGGCGACACCCTGGTGAACCGCATCGAGCTGAAGGGC
ATCGACTTCAAGGAGGACGGCAACATCCTGGGGCACAAGCTGGAGTA
CAACTACAACAGCCACAACGTCTATATCATGGCCGACAAGCAGAAGA
ACGGCATCAAGGTGAACTTCAAGATCCGCCACAACATCGAGGACGGC
AGCGTGCAGCTCGCCGACCACTACCAGCAGAACACCCCCATCGGCGA
CGGCCCCGTGCTGCTGCCCGACAACCACTACCTGAGCACCCAGTCCG
CCCTGAGCAAAGACCCCAACGAGAAGCGCGATCACATGGTCCTGCTG
GAGTTCGTGACCGCCGCCGGGATCACTCTCGGCATGGACGAGCTGTA
CAAGTAACCTGCAGGCGCCGGCGTCCTCTGAGTGCTGAAGGCTTGCT
GTAGGCTGTATGCTGTTGAGTCTCAGAGATGCCCGGGTTTTTGCCTC
CAACTGACTCGGGATCCTGAGATTCAACAGTGTATGATGCCTGTTAC
TAGCATTCACATGGAGAGCTCGCTGATCAGCCTCGACTGTGCCTTCT
AGTTGCCAGCCATCTGTTGTTTGCCCCTCCCCCGTGCCTTCCTTGAC
CCTGGAAGGTGCCACTCCCACTGTCCTTTCCTAATAAAATGAGGAAA
TTGCATCGCATTGTCTGAGTAGGTGTCATTCTATTCTGGGGGGTGGG
GTGGGGCAGGACAGCAAGGGGGAGGATTGGGAAGACAATAGCAGGCA
TGCTGGGGATGCGGTGGGCTCTATGGAAGCTTGAATTCAGCTGACGT
GCCTCGGACCGCTAGGAACCCCTAGTGATGGAGTTGGCCACTCCCTC
TCTGCGCGCTCGCTCGCTCACTGAGGCCGGGCGACCAAAGGTCGCCC
GACGCCCGGGCTTTGCCCGGGCGGCCTCAGTGAGCGAGCGAGCGCGC
AG
Exemplary pITR.CAG.miR2v4-155_EGFP sequence
(SEQ ID NO: 231)
CCTGCAGGCAGCTGCGCGCTCGCTCGCTCACTGAGGCCGCCCGGGCG
TCGGGCGACCTTTGGTCGCCCGGCCTCAGTGAGCGAGCGAGCGCGCA
GAGAGGGAGTGGCCAACTCCATCACTAGGGGTTCCTGCGGCCGCACG
CGTGACATTGATTATTGACTAGTTATTAATAGTAATCAATTACGGGG
TCATTAGTTCATAGCCCATATATGGAGTTCCGCGTTACATAACTTAC
GGTAAATGGCCCGCCTGGCTGACCGCCCAACGACCCCCGCCCATTGA
CGTCAATAATGACGTATGTTCCCATAGTAACGCCAATAGGGACTTTC
CATTGACGTCAATGGGTGGACTATTTACGGTAAACTGCCCACTTGGC
AGTACATCAAGTGTATCATATGCCAAGTACGCCCCCTATTGACGTCA
ATGACGGTAAATGGCCCGCCTGGCATTATGCCCAGTACATGACCTTA
TGGGACTTTCCTACTTGGCAGTACATCTACGTATTAGTCATCGCTAT
TACCATGGGTCGAGGTGAGCCCCACGTTCTGCTTCACTCTCCCCATC
TCCCCCCCCTCCCCACCCCCAATTTTGTATTTATTTATTTTTTAATT
ATTTTGTGCAGCGATGGGGGCGGGGGGGGGGGGGGCGCGCGCCAGGC
GGGGCGGGGCGGGGCGAGGGGCGGGGCGGGGCGAGGCGGAGAGGTGC
GGCGGCAGCCAATCAGAGCGGCGCGCTCCGAAAGTTTCCTTTTATGG
CGAGGCGGCGGCGGCGGCGGCCCTATAAAAAGCGAAGCGCGCGGCGG
GCGGGAGTCGCTGCGTTGCCTTCGCCCCGTGCCCCGCTCCGCGCCGC
CTCGCGCCGCCCGCCCCGGCTCTGACTGACCGCGTTACTCCCACAGG
TGAGCGGGCGGGACGGCCCTTCTCCTCCGGGCTGTAATTAGCGCTTG
GTTTAATGACGGCTCGTTTCTTTTCTGTGGCTGCGTGAAAGCCTTAA
AGGGCTCCGGGAGGGCCCTTTGTGCGGGGGGGAGCGGCTCGGGGGGT
GCGTGCGTGTGTGTGTGCGTGGGGAGCGCCGCGTGCGGCCCGCGCTG
CCCGGCGGCTGTGAGCGCTGCGGGCGCGGCGCGGGGCTTTGTGCGCT
CCGCGTGTGCGCGAGGGGAGCGCGGCCGGGGGCGGTGCCCCGCGGTG
CGGGGGGGCTGCGAGGGGAACAAAGGCTGCGTGCGGGGTGTGTGCGT
GGGGGGGTGAGCAGGGGGTGTGGGCGCGGCGGTCGGGCTGTAACCCC
CCCCTGCACCCCCCTCCCCGAGTTGCTGAGCACGGCCCGGCTTCGGG
TGCGGGGCTCCGTGCGGGGCGTGGCGCGGGGCTCGCCGTGCCGGGCG
GGGGGTGGCGGCAGGTGGGGGTGCCGGGCGGGGCGGGGCCGCCTCGG
GCCGGGGAGGGCTCGGGGGAGGGGCGCGGCGGCCCCCGGAGCGCCGG
CGTCCTCTGAGTGCTGAAGGCTTGCTGTAGGCTGTATGCTGTTGAGT
CTCAGAGATGCCCGGAAGTTTGCCTCCAACTCTTTCGGGATCCTGAG
ATTCAACAGTGTATGATGCCTGTTACTAGCATTCACATGGATCTAGA
GCCTCTGCTAACCATGTTCATGCCTTCTTCTTTTTCCTACAGCTCCT
GGGCAACGTGCTGGTTATTGTGACCGGTCGCTAGCCACCATGGTGAG
CAAGGGCGAGGAGCTGTTCACCGGGGTGGTGCCCATCCTGGTCGAGC
TGGACGGCGACGTAAACGGCCACAAGTTCAGCGTGTCCGGCGAGGGC
GAGGGCGATGCCACCTACGGCAAGCTGACCCTGAAGTTCATCTGCAC
CACCGGCAAGCTGCCCGTGCCCTGGCCCACCCTCGTGACCACCCTGA
CCTACGGCGTGCAGTGCTTCAGCCGCTACCCCGACCACATGAAGCAG
CACGACTTCTTCAAGTCCGCCATGCCCGAAGGCTACGTCCAGGAGCG
CACCATCTTCTTCAAGGACGACGGCAACTACAAGACCCGCGCCGAGG
TGAAGTTCGAGGGCGACACCCTGGTGAACCGCATCGAGCTGAAGGGC
ATCGACTTCAAGGAGGACGGCAACATCCTGGGGCACAAGCTGGAGTA
CAACTACAACAGCCACAACGTCTATATCATGGCCGACAAGCAGAAGA
ACGGCATCAAGGTGAACTTCAAGATCCGCCACAACATCGAGGACGGC
AGCGTGCAGCTCGCCGACCACTACCAGCAGAACACCCCCATCGGCGA
CGGCCCCGTGCTGCTGCCCGACAACCACTACCTGAGCACCCAGTCCG
CCCTGAGCAAAGACCCCAACGAGAAGCGCGATCACATGGTCCTGCTG
GAGTTCGTGACCGCCGCCGGGATCACTCTCGGCATGGACGAGCTGTA
CAAGTAACCTGCAGGCGCCGGCGTCCTCTGAGTGCTGAAGGCTTGCT
GTAGGCTGTATGCTGTTGAGTCTCAGAGATGCCCGGAAGTTTGCCTC
CAACTCTTTCGGGATCCTGAGATTCAACAGTGTATGATGCCTGTTAC
TAGCATTCACATGGAGAGCTCGCTGATCAGCCTCGACTGTGCCTTCT
AGTTGCCAGCCATCTGTTGTTTGCCCCTCCCCCGTGCCTTCCTTGAC
CCTGGAAGGTGCCACTCCCACTGTCCTTTCCTAATAAAATGAGGAAA
TTGCATCGCATTGTCTGAGTAGGTGTCATTCTATTCTGGGGGGTGGG
GTGGGGCAGGACAGCAAGGGGGAGGATTGGGAAGACAATAGCAGGCA
TGCTGGGGATGCGGTGGGCTCTATGGAAGCTTGAATTCAGCTGACGT
GCCTCGGACCGCTAGGAACCCCTAGTGATGGAGTTGGCCACTCCCTC
TCTGCGCGCTCGCTCGCTCACTGAGGCCGGGCGACCAAAGGTCGCCC
GACGCCCGGGCTTTGCCCGGGCGGCCTCAGTGAGCGAGCGAGCGCGC
AG
Exemplary pITR.CAG.miR4-155_EGFP sequence
(SEQ ID NO: 232)
CCTGCAGGCAGCTGCGCGCTCGCTCGCTCACTGAGGCCGCCCGGGCG
TCGGGCGACCTTTGGTCGCCCGGCCTCAGTGAGCGAGCGAGCGCGCA
GAGAGGGAGTGGCCAACTCCATCACTAGGGGTTCCTGCGGCCGCACG
CGTGACATTGATTATTGACTAGTTATTAATAGTAATCAATTACGGGG
TCATTAGTTCATAGCCCATATATGGAGTTCCGCGTTACATAACTTAC
GGTAAATGGCCCGCCTGGCTGACCGCCCAACGACCCCCGCCCATTGA
CGTCAATAATGACGTATGTTCCCATAGTAACGCCAATAGGGACTTTC
CATTGACGTCAATGGGTGGACTATTTACGGTAAACTGCCCACTTGGC
AGTACATCAAGTGTATCATATGCCAAGTACGCCCCCTATTGACGTCA
ATGACGGTAAATGGCCCGCCTGGCATTATGCCCAGTACATGACCTTA
TGGGACTTTCCTACTTGGCAGTACATCTACGTATTAGTCATCGCTAT
TACCATGGGTCGAGGTGAGCCCCACGTTCTGCTTCACTCTCCCCATC
TCCCCCCCCTCCCCACCCCCAATTTTGTATTTATTTATTTTTTAATT
ATTTTGTGCAGCGATGGGGGCGGGGGGGGGGGGGGCGCGCGCCAGGC
GGGGCGGGGCGGGGCGAGGGGCGGGGCGGGGCGAGGCGGAGAGGTGC
GGCGGCAGCCAATCAGAGCGGCGCGCTCCGAAAGTTTCCTTTTATGG
CGAGGCGGCGGCGGCGGCGGCCCTATAAAAAGCGAAGCGCGCGGCGG
GCGGGAGTCGCTGCGTTGCCTTCGCCCCGTGCCCCGCTCCGCGCCGC
CTCGCGCCGCCCGCCCCGGCTCTGACTGACCGCGTTACTCCCACAGG
TGAGCGGGCGGGACGGCCCTTCTCCTCCGGGCTGTAATTAGCGCTTG
GTTTAATGACGGCTCGTTTCTTTTCTGTGGCTGCGTGAAAGCCTTAA
AGGGCTCCGGGAGGGCCCTTTGTGCGGGGGGGAGCGGCTCGGGGGGT
GCGTGCGTGTGTGTGTGCGTGGGGAGCGCCGCGTGCGGCCCGCGCTG
CCCGGCGGCTGTGAGCGCTGCGGGCGCGGCGCGGGGCTTTGTGCGCT
CCGCGTGTGCGCGAGGGGAGCGCGGCCGGGGGCGGTGCCCCGCGGTG
CGGGGGGGCTGCGAGGGGAACAAAGGCTGCGTGCGGGGTGTGTGCGT
GGGGGGGTGAGCAGGGGGTGTGGGCGCGGCGGTCGGGCTGTAACCCC
CCCCTGCACCCCCCTCCCCGAGTTGCTGAGCACGGCCCGGCTTCGGG
TGCGGGGCTCCGTGCGGGGCGTGGCGCGGGGCTCGCCGTGCCGGGCG
GGGGGTGGCGGCAGGTGGGGGTGCCGGGCGGGGCGGGGCCGCCTCGG
GCCGGGGAGGGCTCGGGGGAGGGGCGCGGCGGCCCCCGGAGCGCCGG
CGTCCTCTGAGTGCTGAAGGCTTGCTGTAGGCTGTATGCTGTTCTCG
AAGTGCTTCTGCCGGGTTTTTGCCTCCAACTGACTCGGCGAATACTT
CGAGAACAGTGTATGATGCCTGTTACTAGCATTCACATGGATCTAGA
GCCTCTGCTAACCATGTTCATGCCTTCTTCTTTTTCCTACAGCTCCT
GGGCAACGTGCTGGTTATTGTGACCGGTCGCTAGCCACCATGGTGAG
CAAGGGCGAGGAGCTGTTCACCGGGGTGGTGCCCATCCTGGTCGAGC
TGGACGGCGACGTAAACGGCCACAAGTTCAGCGTGTCCGGCGAGGGC
GAGGGCGATGCCACCTACGGCAAGCTGACCCTGAAGTTCATCTGCAC
CACCGGCAAGCTGCCCGTGCCCTGGCCCACCCTCGTGACCACCCTGA
CCTACGGCGTGCAGTGCTTCAGCCGCTACCCCGACCACATGAAGCAG
CACGACTTCTTCAAGTCCGCCATGCCCGAAGGCTACGTCCAGGAGCG
CACCATCTTCTTCAAGGACGACGGCAACTACAAGACCCGCGCCGAGG
TGAAGTTCGAGGGCGACACCCTGGTGAACCGCATCGAGCTGAAGGGC
ATCGACTTCAAGGAGGACGGCAACATCCTGGGGCACAAGCTGGAGTA
CAACTACAACAGCCACAACGTCTATATCATGGCCGACAAGCAGAAGA
ACGGCATCAAGGTGAACTTCAAGATCCGCCACAACATCGAGGACGGC
AGCGTGCAGCTCGCCGACCACTACCAGCAGAACACCCCCATCGGCGA
CGGCCCCGTGCTGCTGCCCGACAACCACTACCTGAGCACCCAGTCCG
CCCTGAGCAAAGACCCCAACGAGAAGCGCGATCACATGGTCCTGCTG
GAGTTCGTGACCGCCGCCGGGATCACTCTCGGCATGGACGAGCTGTA
CAAGTAACCTGCAGGCGCCGGCGTCCTCTGAGTGCTGAAGGCTTGCT
GTAGGCTGTATGCTGTTCTCGAAGTGCTTCTGCCGGGTTTTTGCCTC
CAACTGACTCGGCGAATACTTCGAGAACAGTGTATGATGCCTGTTAC
TAGCATTCACATGGAGAGCTCGCTGATCAGCCTCGACTGTGCCTTCT
AGTTGCCAGCCATCTGTTGTTTGCCCCTCCCCCGTGCCTTCCTTGAC
CCTGGAAGGTGCCACTCCCACTGTCCTTTCCTAATAAAATGAGGAAA
TTGCATCGCATTGTCTGAGTAGGTGTCATTCTATTCTGGGGGGTGGG
GTGGGGCAGGACAGCAAGGGGGAGGATTGGGAAGACAATAGCAGGCA
TGCTGGGGATGCGGTGGGCTCTATGGAAGCTTGAATTCAGCTGACGT
GCCTCGGACCGCTAGGAACCCCTAGTGATGGAGTTGGCCACTCCCTC
TCTGCGCGCTCGCTCGCTCACTGAGGCCGGGCGACCAAAGGTCGCCC
GACGCCCGGGCTTTGCCCGGGCGGCCTCAGTGAGCGAGCGAGCGCGC
AG
Exemplary pITR.CAG.miR5-155_EGFP sequence
(SEQ ID NO: 233)
CCTGCAGGCAGCTGCGCGCTCGCTCGCTCACTGAGGCCGCCCGGGCG
TCGGGCGACCTTTGGTCGCCCGGCCTCAGTGAGCGAGCGAGCGCGCA
GAGAGGGAGTGGCCAACTCCATCACTAGGGGTTCCTGCGGCCGCACG
CGTGACATTGATTATTGACTAGTTATTAATAGTAATCAATTACGGGG
TCATTAGTTCATAGCCCATATATGGAGTTCCGCGTTACATAACTTAC
GGTAAATGGCCCGCCTGGCTGACCGCCCAACGACCCCCGCCCATTGA
CGTCAATAATGACGTATGTTCCCATAGTAACGCCAATAGGGACTTTC
CATTGACGTCAATGGGTGGACTATTTACGGTAAACTGCCCACTTGGC
AGTACATCAAGTGTATCATATGCCAAGTACGCCCCCTATTGACGTCA
ATGACGGTAAATGGCCCGCCTGGCATTATGCCCAGTACATGACCTTA
TGGGACTTTCCTACTTGGCAGTACATCTACGTATTAGTCATCGCTAT
TACCATGGGTCGAGGTGAGCCCCACGTTCTGCTTCACTCTCCCCATC
TCCCCCCCCTCCCCACCCCCAATTTTGTATTTATTTATTTTTTAATT
ATTTTGTGCAGCGATGGGGGCGGGGGGGGGGGGGGCGCGCGCCAGGC
GGGGCGGGGCGGGGCGAGGGGCGGGGCGGGGCGAGGCGGAGAGGTGC
GGCGGCAGCCAATCAGAGCGGCGCGCTCCGAAAGTTTCCTTTTATGG
CGAGGCGGCGGCGGCGGCGGCCCTATAAAAAGCGAAGCGCGCGGCGG
GCGGGAGTCGCTGCGTTGCCTTCGCCCCGTGCCCCGCTCCGCGCCGC
CTCGCGCCGCCCGCCCCGGCTCTGACTGACCGCGTTACTCCCACAGG
TGAGCGGGCGGGACGGCCCTTCTCCTCCGGGCTGTAATTAGCGCTTG
GTTTAATGACGGCTCGTTTCTTTTCTGTGGCTGCGTGAAAGCCTTAA
AGGGCTCCGGGAGGGCCCTTTGTGCGGGGGGGAGCGGCTCGGGGGGT
GCGTGCGTGTGTGTGTGCGTGGGGAGCGCCGCGTGCGGCCCGCGCTG
CCCGGCGGCTGTGAGCGCTGCGGGCGCGGCGCGGGGCTTTGTGCGCT
CCGCGTGTGCGCGAGGGGAGCGCGGCCGGGGGCGGTGCCCCGCGGTG
CGGGGGGGCTGCGAGGGGAACAAAGGCTGCGTGCGGGGTGTGTGCGT
GGGGGGGTGAGCAGGGGGTGTGGGCGCGGCGGTCGGGCTGTAACCCC
CCCCTGCACCCCCCTCCCCGAGTTGCTGAGCACGGCCCGGCTTCGGG
TGCGGGGCTCCGTGCGGGGCGTGGCGCGGGGCTCGCCGTGCCGGGCG
GGGGGTGGCGGCAGGTGGGGGTGCCGGGCGGGGCGGGGCCGCCTCGG
GCCGGGGAGGGCTCGGGGGAGGGGCGCGGCGGCCCCCGGAGCGCCGG
CGTCCTCTGAGTGCTGAAGGCTTGCTGTAGGCTGTATGCTGTTCTCC
ACCTTGACCACGCGTGTTTTTGCCTCCAACTGACATGTGGGTAAGGT
GGAGAACAGTGTATGATGCCTGTTACTAGCATTCACATGGATCTAGA
GCCTCTGCTAACCATGTTCATGCCTTCTTCTTTTTCCTACAGCTCCT
GGGCAACGTGCTGGTTATTGTGACCGGTCGCTAGCCACCATGGTGAG
CAAGGGCGAGGAGCTGTTCACCGGGGTGGTGCCCATCCTGGTCGAGC
TGGACGGCGACGTAAACGGCCACAAGTTCAGCGTGTCCGGCGAGGGC
GAGGGCGATGCCACCTACGGCAAGCTGACCCTGAAGTTCATCTGCAC
CACCGGCAAGCTGCCCGTGCCCTGGCCCACCCTCGTGACCACCCTGA
CCTACGGCGTGCAGTGCTTCAGCCGCTACCCCGACCACATGAAGCAG
CACGACTTCTTCAAGTCCGCCATGCCCGAAGGCTACGTCCAGGAGCG
CACCATCTTCTTCAAGGACGACGGCAACTACAAGACCCGCGCCGAGG
TGAAGTTCGAGGGCGACACCCTGGTGAACCGCATCGAGCTGAAGGGC
ATCGACTTCAAGGAGGACGGCAACATCCTGGGGCACAAGCTGGAGTA
CAACTACAACAGCCACAACGTCTATATCATGGCCGACAAGCAGAAGA
ACGGCATCAAGGTGAACTTCAAGATCCGCCACAACATCGAGGACGGC
AGCGTGCAGCTCGCCGACCACTACCAGCAGAACACCCCCATCGGCGA
CGGCCCCGTGCTGCTGCCCGACAACCACTACCTGAGCACCCAGTCCG
CCCTGAGCAAAGACCCCAACGAGAAGCGCGATCACATGGTCCTGCTG
GAGTTCGTGACCGCCGCCGGGATCACTCTCGGCATGGACGAGCTGTA
CAAGTAACCTGCAGGCGCCGGCGTCCTCTGAGTGCTGAAGGCTTGCT
GTAGGCTGTATGCTGTTCTCCACCTTGACCACGCGTGTTTTTGCCTC
CAACTGACATGTGGGTAAGGTGGAGAACAGTGTATGATGCCTGTTAC
TAGCATTCACATGGAGAGCTCGCTGATCAGCCTCGACTGTGCCTTCT
AGTTGCCAGCCATCTGTTGTTTGCCCCTCCCCCGTGCCTTCCTTGAC
CCTGGAAGGTGCCACTCCCACTGTCCTTTCCTAATAAAATGAGGAAA
TTGCATCGCATTGTCTGAGTAGGTGTCATTCTATTCTGGGGGGTGGG
GTGGGGCAGGACAGCAAGGGGGAGGATTGGGAAGACAATAGCAGGCA
TGCTGGGGATGCGGTGGGCTCTATGGAAGCTTGAATTCAGCTGACGT
GCCTCGGACCGCTAGGAACCCCTAGTGATGGAGTTGGCCACTCCCTC
TCTGCGCGCTCGCTCGCTCACTGAGGCCGGGCGACCAAAGGTCGCCC
GACGCCCGGGCTTTGCCCGGGCGGCCTCAGTGAGCGAGCGAGCGCGC
AG
Exemplary pITR.CAG.miR6-155_EGFP sequence
(SEQ ID NO: 234)
CCTGCAGGCAGCTGCGCGCTCGCTCGCTCACTGAGGCCGCCCGGGCG
TCGGGCGACCTTTGGTCGCCCGGCCTCAGTGAGCGAGCGAGCGCGCA
GAGAGGGAGTGGCCAACTCCATCACTAGGGGTTCCTGCGGCCGCACG
CGTGACATTGATTATTGACTAGTTATTAATAGTAATCAATTACGGGG
TCATTAGTTCATAGCCCATATATGGAGTTCCGCGTTACATAACTTAC
GGTAAATGGCCCGCCTGGCTGACCGCCCAACGACCCCCGCCCATTGA
CGTCAATAATGACGTATGTTCCCATAGTAACGCCAATAGGGACTTTC
CATTGACGTCAATGGGTGGACTATTTACGGTAAACTGCCCACTTGGC
AGTACATCAAGTGTATCATATGCCAAGTACGCCCCCTATTGACGTCA
ATGACGGTAAATGGCCCGCCTGGCATTATGCCCAGTACATGACCTTA
TGGGACTTTCCTACTTGGCAGTACATCTACGTATTAGTCATCGCTAT
TACCATGGGTCGAGGTGAGCCCCACGTTCTGCTTCACTCTCCCCATC
TCCCCCCCCTCCCCACCCCCAATTTTGTATTTATTTATTTTTTAATT
ATTTTGTGCAGCGATGGGGGCGGGGGGGGGGGGGGCGCGCGCCAGGC
GGGGCGGGGCGGGGCGAGGGGCGGGGCGGGGCGAGGCGGAGAGGTGC
GGCGGCAGCCAATCAGAGCGGCGCGCTCCGAAAGTTTCCTTTTATGG
CGAGGCGGCGGCGGCGGCGGCCCTATAAAAAGCGAAGCGCGCGGCGG
GCGGGAGTCGCTGCGTTGCCTTCGCCCCGTGCCCCGCTCCGCGCCGC
CTCGCGCCGCCCGCCCCGGCTCTGACTGACCGCGTTACTCCCACAGG
TGAGCGGGCGGGACGGCCCTTCTCCTCCGGGCTGTAATTAGCGCTTG
GTTTAATGACGGCTCGTTTCTTTTCTGTGGCTGCGTGAAAGCCTTAA
AGGGCTCCGGGAGGGCCCTTTGTGCGGGGGGGAGCGGCTCGGGGGGT
GCGTGCGTGTGTGTGTGCGTGGGGAGCGCCGCGTGCGGCCCGCGCTG
CCCGGCGGCTGTGAGCGCTGCGGGCGCGGCGCGGGGCTTTGTGCGCT
CCGCGTGTGCGCGAGGGGAGCGCGGCCGGGGGCGGTGCCCCGCGGTG
CGGGGGGGCTGCGAGGGGAACAAAGGCTGCGTGCGGGGTGTGTGCGT
GGGGGGGTGAGCAGGGGGTGTGGGCGCGGCGGTCGGGCTGTAACCCC
CCCCTGCACCCCCCTCCCCGAGTTGCTGAGCACGGCCCGGCTTCGGG
TGCGGGGCTCCGTGCGGGGCGTGGCGCGGGGCTCGCCGTGCCGGGCG
GGGGGTGGCGGCAGGTGGGGGTGCCGGGCGGGGCGGGGCCGCCTCGG
GCCGGGGAGGGCTCGGGGGAGGGGCGCGGCGGCCCCCGGAGCGCCGG
CGTCCTCTGAGTGCTGAAGGCTTGCTGTAGGCTGTATGCTGATACTG
TCATAGTAGTACCAGGTTTTTGCCTCCAACTGACCTGGTCTATATGA
CAGTATCAGTGTATGATGCCTGTTACTAGCATTCACATGGATCTAGA
GCCTCTGCTAACCATGTTCATGCCTTCTTCTTTTTCCTACAGCTCCT
GGGCAACGTGCTGGTTATTGTGACCGGTCGCTAGCCACCATGGTGAG
CAAGGGCGAGGAGCTGTTCACCGGGGTGGTGCCCATCCTGGTCGAGC
TGGACGGCGACGTAAACGGCCACAAGTTCAGCGTGTCCGGCGAGGGC
GAGGGCGATGCCACCTACGGCAAGCTGACCCTGAAGTTCATCTGCAC
CACCGGCAAGCTGCCCGTGCCCTGGCCCACCCTCGTGACCACCCTGA
CCTACGGCGTGCAGTGCTTCAGCCGCTACCCCGACCACATGAAGCAG
CACGACTTCTTCAAGTCCGCCATGCCCGAAGGCTACGTCCAGGAGCG
CACCATCTTCTTCAAGGACGACGGCAACTACAAGACCCGCGCCGAGG
TGAAGTTCGAGGGCGACACCCTGGTGAACCGCATCGAGCTGAAGGGC
ATCGACTTCAAGGAGGACGGCAACATCCTGGGGCACAAGCTGGAGTA
CAACTACAACAGCCACAACGTCTATATCATGGCCGACAAGCAGAAGA
ACGGCATCAAGGTGAACTTCAAGATCCGCCACAACATCGAGGACGGC
AGCGTGCAGCTCGCCGACCACTACCAGCAGAACACCCCCATCGGCGA
CGGCCCCGTGCTGCTGCCCGACAACCACTACCTGAGCACCCAGTCCG
CCCTGAGCAAAGACCCCAACGAGAAGCGCGATCACATGGTCCTGCTG
GAGTTCGTGACCGCCGCCGGGATCACTCTCGGCATGGACGAGCTGTA
CAAGTAACCTGCAGGCGCCGGCGTCCTCTGAGTGCTGAAGGCTTGCT
GTAGGCTGTATGCTGATACTGTCATAGTAGTACCAGGTTTTTGCCTC
CAACTGACCTGGTCTATATGACAGTATCAGTGTATGATGCCTGTTAC
TAGCATTCACATGGAGAGCTCGCTGATCAGCCTCGACTGTGCCTTCT
AGTTGCCAGCCATCTGTTGTTTGCCCCTCCCCCGTGCCTTCCTTGAC
CCTGGAAGGTGCCACTCCCACTGTCCTTTCCTAATAAAATGAGGAAA
TTGCATCGCATTGTCTGAGTAGGTGTCATTCTATTCTGGGGGGTGGG
GTGGGGCAGGACAGCAAGGGGGAGGATTGGGAAGACAATAGCAGGCA
TGCTGGGGATGCGGTGGGCTCTATGGAAGCTTGAATTCAGCTGACGT
GCCTCGGACCGCTAGGAACCCCTAGTGATGGAGTTGGCCACTCCCTC
TCTGCGCGCTCGCTCGCTCACTGAGGCCGGGCGACCAAAGGTCGCCC
GACGCCCGGGCTTTGCCCGGGCGGCCTCAGTGAGCGAGCGAGCGCGC
AG
Exemplary pITR.CAG.miR7-155_EGFP sequence
(SEQ ID NO: 235)
CCTGCAGGCAGCTGCGCGCTCGCTCGCTCACTGAGGCCGCCCGGGCG
TCGGGCGACCTTTGGTCGCCCGGCCTCAGTGAGCGAGCGAGCGCGCA
GAGAGGGAGTGGCCAACTCCATCACTAGGGGTTCCTGCGGCCGCACG
CGTGACATTGATTATTGACTAGTTATTAATAGTAATCAATTACGGGG
TCATTAGTTCATAGCCCATATATGGAGTTCCGCGTTACATAACTTAC
GGTAAATGGCCCGCCTGGCTGACCGCCCAACGACCCCCGCCCATTGA
CGTCAATAATGACGTATGTTCCCATAGTAACGCCAATAGGGACTTTC
CATTGACGTCAATGGGTGGACTATTTACGGTAAACTGCCCACTTGGC
AGTACATCAAGTGTATCATATGCCAAGTACGCCCCCTATTGACGTCA
ATGACGGTAAATGGCCCGCCTGGCATTATGCCCAGTACATGACCTTA
TGGGACTTTCCTACTTGGCAGTACATCTACGTATTAGTCATCGCTAT
TACCATGGGTCGAGGTGAGCCCCACGTTCTGCTTCACTCTCCCCATC
TCCCCCCCCTCCCCACCCCCAATTTTGTATTTATTTATTTTTTAATT
ATTTTGTGCAGCGATGGGGGCGGGGGGGGGGGGGGCGCGCGCCAGGC
GGGGCGGGGCGGGGCGAGGGGCGGGGCGGGGCGAGGCGGAGAGGTGC
GGCGGCAGCCAATCAGAGCGGCGCGCTCCGAAAGTTTCCTTTTATGG
CGAGGCGGCGGCGGCGGCGGCCCTATAAAAAGCGAAGCGCGCGGCGG
GCGGGAGTCGCTGCGTTGCCTTCGCCCCGTGCCCCGCTCCGCGCCGC
CTCGCGCCGCCCGCCCCGGCTCTGACTGACCGCGTTACTCCCACAGG
TGAGCGGGCGGGACGGCCCTTCTCCTCCGGGCTGTAATTAGCGCTTG
GTTTAATGACGGCTCGTTTCTTTTCTGTGGCTGCGTGAAAGCCTTAA
AGGGCTCCGGGAGGGCCCTTTGTGCGGGGGGGAGCGGCTCGGGGGGT
GCGTGCGTGTGTGTGTGCGTGGGGAGCGCCGCGTGCGGCCCGCGCTG
CCCGGCGGCTGTGAGCGCTGCGGGCGCGGCGCGGGGCTTTGTGCGCT
CCGCGTGTGCGCGAGGGGAGCGCGGCCGGGGGCGGTGCCCCGCGGTG
CGGGGGGGCTGCGAGGGGAACAAAGGCTGCGTGCGGGGTGTGTGCGT
GGGGGGGTGAGCAGGGGGTGTGGGCGCGGCGGTCGGGCTGTAACCCC
CCCCTGCACCCCCCTCCCCGAGTTGCTGAGCACGGCCCGGCTTCGGG
TGCGGGGCTCCGTGCGGGGCGTGGCGCGGGGCTCGCCGTGCCGGGCG
GGGGGTGGCGGCAGGTGGGGGTGCCGGGCGGGGCGGGGCCGCCTCGG
GCCGGGGAGGGCTCGGGGGAGGGGCGCGGCGGCCCCCGGAGCGCCGG
CGTCCTCTGAGTGCTGAAGGCTTGCTGTAGGCTGTATGCTGTAGTCG
GAGGTGATGTCGGGGGTTTTTGCCTCCAACTGACTCCTGCATACCTT
CGATTACAGTGTATGATGCCTGTTACTAGCATTCACATGGATCTAGA
GCCTCTGCTAACCATGTTCATGCCTTCTTCTTTTTCCTACAGCTCCT
GGGCAACGTGCTGGTTATTGTGACCGGTCGCTAGCCACCATGGTGAG
CAAGGGCGAGGAGCTGTTCACCGGGGTGGTGCCCATCCTGGTCGAGC
TGGACGGCGACGTAAACGGCCACAAGTTCAGCGTGTCCGGCGAGGGC
GAGGGCGATGCCACCTACGGCAAGCTGACCCTGAAGTTCATCTGCAC
CACCGGCAAGCTGCCCGTGCCCTGGCCCACCCTCGTGACCACCCTGA
CCTACGGCGTGCAGTGCTTCAGCCGCTACCCCGACCACATGAAGCAG
CACGACTTCTTCAAGTCCGCCATGCCCGAAGGCTACGTCCAGGAGCG
CACCATCTTCTTCAAGGACGACGGCAACTACAAGACCCGCGCCGAGG
TGAAGTTCGAGGGCGACACCCTGGTGAACCGCATCGAGCTGAAGGGC
ATCGACTTCAAGGAGGACGGCAACATCCTGGGGCACAAGCTGGAGTA
CAACTACAACAGCCACAACGTCTATATCATGGCCGACAAGCAGAAGA
ACGGCATCAAGGTGAACTTCAAGATCCGCCACAACATCGAGGACGGC
AGCGTGCAGCTCGCCGACCACTACCAGCAGAACACCCCCATCGGCGA
CGGCCCCGTGCTGCTGCCCGACAACCACTACCTGAGCACCCAGTCCG
CCCTGAGCAAAGACCCCAACGAGAAGCGCGATCACATGGTCCTGCTG
GAGTTCGTGACCGCCGCCGGGATCACTCTCGGCATGGACGAGCTGTA
CAAGTAACCTGCAGGCGCCGGCGTCCTCTGAGTGCTGAAGGCTTGCT
GTAGGCTGTATGCTGTAGTCGGAGGTGATGTCGGGGGTTTTTGCCTC
CAACTGACTCCTGCATACCTTCGATTACAGTGTATGATGCCTGTTAC
TAGCATTCACATGGAGAGCTCGCTGATCAGCCTCGACTGTGCCTTCT
AGTTGCCAGCCATCTGTTGTTTGCCCCTCCCCCGTGCCTTCCTTGAC
CCTGGAAGGTGCCACTCCCACTGTCCTTTCCTAATAAAATGAGGAAA
TTGCATCGCATTGTCTGAGTAGGTGTCATTCTATTCTGGGGGGTGGG
GTGGGGCAGGACAGCAAGGGGGAGGATTGGGAAGACAATAGCAGGCA
TGCTGGGGATGCGGTGGGCTCTATGGAAGCTTGAATTCAGCTGACGT
GCCTCGGACCGCTAGGAACCCCTAGTGATGGAGTTGGCCACTCCCTC
TCTGCGCGCTCGCTCGCTCACTGAGGCCGGGCGACCAAAGGTCGCCC
GACGCCCGGGCTTTGCCCGGGCGGCCTCAGTGAGCGAGCGAGCGCGC
AG
Exemplary pITR.CAG.miR1-16_EGFP sequence
(SEQ ID NO: 236)
CCTGCAGGCAGCTGCGCGCTCGCTCGCTCACTGAGGCCGCCCGGGCG
TCGGGCGACCTTTGGTCGCCCGGCCTCAGTGAGCGAGCGAGCGCGCA
GAGAGGGAGTGGCCAACTCCATCACTAGGGGTTCCTGCGGCCGCACG
CGTGACATTGATTATTGACTAGTTATTAATAGTAATCAATTACGGGG
TCATTAGTTCATAGCCCATATATGGAGTTCCGCGTTACATAACTTAC
GGTAAATGGCCCGCCTGGCTGACCGCCCAACGACCCCCGCCCATTGA
CGTCAATAATGACGTATGTTCCCATAGTAACGCCAATAGGGACTTTC
CATTGACGTCAATGGGTGGACTATTTACGGTAAACTGCCCACTTGGC
AGTACATCAAGTGTATCATATGCCAAGTACGCCCCCTATTGACGTCA
ATGACGGTAAATGGCCCGCCTGGCATTATGCCCAGTACATGACCTTA
TGGGACTTTCCTACTTGGCAGTACATCTACGTATTAGTCATCGCTAT
TACCATGGGTCGAGGTGAGCCCCACGTTCTGCTTCACTCTCCCCATC
TCCCCCCCCTCCCCACCCCCAATTTTGTATTTATTTATTTTTTAATT
ATTTTGTGCAGCGATGGGGGCGGGGGGGGGGGGGGCGCGCGCCAGGC
GGGGCGGGGCGGGGCGAGGGGCGGGGCGGGGCGAGGCGGAGAGGTGC
GGCGGCAGCCAATCAGAGCGGCGCGCTCCGAAAGTTTCCTTTTATGG
CGAGGCGGCGGCGGCGGCGGCCCTATAAAAAGCGAAGCGCGCGGCGG
GCGGGAGTCGCTGCGTTGCCTTCGCCCCGTGCCCCGCTCCGCGCCGC
CTCGCGCCGCCCGCCCCGGCTCTGACTGACCGCGTTACTCCCACAGG
TGAGCGGGCGGGACGGCCCTTCTCCTCCGGGCTGTAATTAGCGCTTG
GTTTAATGACGGCTCGTTTCTTTTCTGTGGCTGCGTGAAAGCCTTAA
AGGGCTCCGGGAGGGCCCTTTGTGCGGGGGGGAGCGGCTCGGGGGGT
GCGTGCGTGTGTGTGTGCGTGGGGAGCGCCGCGTGCGGCCCGCGCTG
CCCGGCGGCTGTGAGCGCTGCGGGCGCGGCGCGGGGCTTTGTGCGCT
CCGCGTGTGCGCGAGGGGAGCGCGGCCGGGGGCGGTGCCCCGCGGTG
CGGGGGGGCTGCGAGGGGAACAAAGGCTGCGTGCGGGGTGTGTGCGT
GGGGGGGTGAGCAGGGGGTGTGGGCGCGGCGGTCGGGCTGTAACCCC
CCCCTGCACCCCCCTCCCCGAGTTGCTGAGCACGGCCCGGCTTCGGG
TGCGGGGCTCCGTGCGGGGCGTGGCGCGGGGCTCGCCGTGCCGGGCG
GGGGGTGGCGGCAGGTGGGGGTGCCGGGCGGGGCGGGGCCGCCTCGG
GCCGGGGAGGGCTCGGGGGAGGGGCGCGGCGGCCCCCGGAGCGCCGG
CGCATAGCTCTTATGATAGCAATGTCAGCAGTGCCTTTGAGAATCCT
GATGGAGCGGGTTAAGATTCTAAAATTATCACGCTCCATGAGTGATT
CTCAGAAGTAAGGTTGACCATACTCTACAGTTGTGTCTAGAGCCTCT
GCTAACCATGTTCATGCCTTCTTCTTTTTCCTACAGCTCCTGGGCAA
CGTGCTGGTTATTGTGACCGGTCGCTAGCCACCATGGTGAGCAAGGG
CGAGGAGCTGTTCACCGGGGTGGTGCCCATCCTGGTCGAGCTGGACG
GCGACGTAAACGGCCACAAGTTCAGCGTGTCCGGCGAGGGCGAGGGC
GATGCCACCTACGGCAAGCTGACCCTGAAGTTCATCTGCACCACCGG
CAAGCTGCCCGTGCCCTGGCCCACCCTCGTGACCACCCTGACCTACG
GCGTGCAGTGCTTCAGCCGCTACCCCGACCACATGAAGCAGCACGAC
TTCTTCAAGTCCGCCATGCCCGAAGGCTACGTCCAGGAGCGCACCAT
CTTCTTCAAGGACGACGGCAACTACAAGACCCGCGCCGAGGTGAAGT
TCGAGGGCGACACCCTGGTGAACCGCATCGAGCTGAAGGGCATCGAC
TTCAAGGAGGACGGCAACATCCTGGGGCACAAGCTGGAGTACAACTA
CAACAGCCACAACGTCTATATCATGGCCGACAAGCAGAAGAACGGCA
TCAAGGTGAACTTCAAGATCCGCCACAACATCGAGGACGGCAGCGTG
CAGCTCGCCGACCACTACCAGCAGAACACCCCCATCGGCGACGGCCC
CGTGCTGCTGCCCGACAACCACTACCTGAGCACCCAGTCCGCCCTGA
GCAAAGACCCCAACGAGAAGCGCGATCACATGGTCCTGCTGGAGTTC
GTGACCGCCGCCGGGATCACTCTCGGCATGGACGAGCTGTACAAGTA
ACCTGCAGGCGCCGGCGCATAGCTCTTATGATAGCAATGTCAGCAGT
GCCTTTGAGAATCCTGATGGAGCGGGTTAAGATTCTAAAATTATCAC
GCTCCATGAGTGATTCTCAGAAGTAAGGTTGACCATACTCTACAGTT
GTGGAGCTCGCTGATCAGCCTCGACTGTGCCTTCTAGTTGCCAGCCA
TCTGTTGTTTGCCCCTCCCCCGTGCCTTCCTTGACCCTGGAAGGTGC
CACTCCCACTGTCCTTTCCTAATAAAATGAGGAAATTGCATCGCATT
GTCTGAGTAGGTGTCATTCTATTCTGGGGGGTGGGGTGGGGCAGGAC
AGCAAGGGGGAGGATTGGGAAGACAATAGCAGGCATGCTGGGGATGC
GGTGGGCTCTATGGAAGCTTGAATTCAGCTGACGTGCCTCGGACCGC
TAGGAACCCCTAGTGATGGAGTTGGCCACTCCCTCTCTGCGCGCTCG
CTCGCTCACTGAGGCCGGGCGACCAAAGGTCGCCCGACGCCCGGGCT
TTGCCCGGGCGGCCTCAGTGAGCGAGCGAGCGCGCAG
Exemplary pITR.CAG.miR1-26_EGFP sequence
(SEQ ID NO: 237)
CCTGCAGGCAGCTGCGCGCTCGCTCGCTCACTGAGGCCGCCCGGGCG
TCGGGCGACCTTTGGTCGCCCGGCCTCAGTGAGCGAGCGAGCGCGCA
GAGAGGGAGTGGCCAACTCCATCACTAGGGGTTCCTGCGGCCGCACG
CGTGACATTGATTATTGACTAGTTATTAATAGTAATCAATTACGGGG
TCATTAGTTCATAGCCCATATATGGAGTTCCGCGTTACATAACTTAC
GGTAAATGGCCCGCCTGGCTGACCGCCCAACGACCCCCGCCCATTGA
CGTCAATAATGACGTATGTTCCCATAGTAACGCCAATAGGGACTTTC
CATTGACGTCAATGGGTGGACTATTTACGGTAAACTGCCCACTTGGC
AGTACATCAAGTGTATCATATGCCAAGTACGCCCCCTATTGACGTCA
ATGACGGTAAATGGCCCGCCTGGCATTATGCCCAGTACATGACCTTA
TGGGACTTTCCTACTTGGCAGTACATCTACGTATTAGTCATCGCTAT
TACCATGGGTCGAGGTGAGCCCCACGTTCTGCTTCACTCTCCCCATC
TCCCCCCCCTCCCCACCCCCAATTTTGTATTTATTTATTTTTTAATT
ATTTTGTGCAGCGATGGGGGCGGGGGGGGGGGGGGCGCGCGCCAGGC
GGGGCGGGGCGGGGCGAGGGGCGGGGCGGGGCGAGGCGGAGAGGTGC
GGCGGCAGCCAATCAGAGCGGCGCGCTCCGAAAGTTTCCTTTTATGG
CGAGGCGGCGGCGGCGGCGGCCCTATAAAAAGCGAAGCGCGCGGCGG
GCGGGAGTCGCTGCGTTGCCTTCGCCCCGTGCCCCGCTCCGCGCCGC
CTCGCGCCGCCCGCCCCGGCTCTGACTGACCGCGTTACTCCCACAGG
TGAGCGGGCGGGACGGCCCTTCTCCTCCGGGCTGTAATTAGCGCTTG
GTTTAATGACGGCTCGTTTCTTTTCTGTGGCTGCGTGAAAGCCTTAA
AGGGCTCCGGGAGGGCCCTTTGTGCGGGGGGGAGCGGCTCGGGGGGT
GCGTGCGTGTGTGTGTGCGTGGGGAGCGCCGCGTGCGGCCCGCGCTG
CCCGGCGGCTGTGAGCGCTGCGGGCGCGGCGCGGGGCTTTGTGCGCT
CCGCGTGTGCGCGAGGGGAGCGCGGCCGGGGGCGGTGCCCCGCGGTG
CGGGGGGGCTGCGAGGGGAACAAAGGCTGCGTGCGGGGTGTGTGCGT
GGGGGGGTGAGCAGGGGGTGTGGGCGCGGCGGTCGGGCTGTAACCCC
CCCCTGCACCCCCCTCCCCGAGTTGCTGAGCACGGCCCGGCTTCGGG
TGCGGGGCTCCGTGCGGGGCGTGGCGCGGGGCTCGCCGTGCCGGGCG
GGGGGTGGCGGCAGGTGGGGGTGCCGGGCGGGGCGGGGCCGCCTCGG
GCCGGGGAGGGCTCGGGGGAGGGGCGCGGCGGCCCCCGGAGCGCCGG
CGGAGCAGGAGGACCAAGGCCCTGGCGAAGGCCGTGGCCTCGTTGAG
AATCCTGATGGAGCGGTGTGCAGGTCCCAATGGCCGCTCCATAAGGA
TTCTCCACGGGGACGCGGGCCTGGACGCCGGCATCCGGGCTCAGGAC
CCCCCTCTCTAGAGCCTCTGCTAACCATGTTCATGCCTTCTTCTTTT
TCCTACAGCTCCTGGGCAACGTGCTGGTTATTGTGACCGGTCGCTAG
CCACCATGGTGAGCAAGGGCGAGGAGCTGTTCACCGGGGTGGTGCCC
ATCCTGGTCGAGCTGGACGGCGACGTAAACGGCCACAAGTTCAGCGT
GTCCGGCGAGGGCGAGGGCGATGCCACCTACGGCAAGCTGACCCTGA
AGTTCATCTGCACCACCGGCAAGCTGCCCGTGCCCTGGCCCACCCTC
GTGACCACCCTGACCTACGGCGTGCAGTGCTTCAGCCGCTACCCCGA
CCACATGAAGCAGCACGACTTCTTCAAGTCCGCCATGCCCGAAGGCT
ACGTCCAGGAGCGCACCATCTTCTTCAAGGACGACGGCAACTACAAG
ACCCGCGCCGAGGTGAAGTTCGAGGGCGACACCCTGGTGAACCGCAT
CGAGCTGAAGGGCATCGACTTCAAGGAGGACGGCAACATCCTGGGGC
ACAAGCTGGAGTACAACTACAACAGCCACAACGTCTATATCATGGCC
GACAAGCAGAAGAACGGCATCAAGGTGAACTTCAAGATCCGCCACAA
CATCGAGGACGGCAGCGTGCAGCTCGCCGACCACTACCAGCAGAACA
CCCCCATCGGCGACGGCCCCGTGCTGCTGCCCGACAACCACTACCTG
AGCACCCAGTCCGCCCTGAGCAAAGACCCCAACGAGAAGCGCGATCA
CATGGTCCTGCTGGAGTTCGTGACCGCCGCCGGGATCACTCTCGGCA
TGGACGAGCTGTACAAGTAACCTGCAGGCGCCGGCGGAGCAGGAGGA
CCAAGGCCCTGGCGAAGGCCGTGGCCTCGTTGAGAATCCTGATGGAG
CGGTGTGCAGGTCCCAATGGCCGCTCCATAAGGATTCTCCACGGGGA
CGCGGGCCTGGACGCCGGCATCCGGGCTCAGGACCCCCCTCGAGCTC
GCTGATCAGCCTCGACTGTGCCTTCTAGTTGCCAGCCATCTGTTGTT
TGCCCCTCCCCCGTGCCTTCCTTGACCCTGGAAGGTGCCACTCCCAC
TGTCCTTTCCTAATAAAATGAGGAAATTGCATCGCATTGTCTGAGTA
GGTGTCATTCTATTCTGGGGGGTGGGGTGGGGCAGGACAGCAAGGGG
GAGGATTGGGAAGACAATAGCAGGCATGCTGGGGATGCGGTGGGCTC
TATGGAAGCTTGAATTCAGCTGACGTGCCTCGGACCGCTAGGAACCC
CTAGTGATGGAGTTGGCCACTCCCTCTCTGCGCGCTCGCTCGCTCAC
TGAGGCCGGGCGACCAAAGGTCGCCCGACGCCCGGGCTTTGCCCGGG
CGGCCTCAGTGAGCGAGCGAGCGCGCAG
Exemplary pITR.CAG.miR1-96_EGFP sequence
(SEQ ID NO: 238)
CCTGCAGGCAGCTGCGCGCTCGCTCGCTCACTGAGGCCGCCCGGGCG
TCGGGCGACCTTTGGTCGCCCGGCCTCAGTGAGCGAGCGAGCGCGCA
GAGAGGGAGTGGCCAACTCCATCACTAGGGGTTCCTGCGGCCGCACG
CGTGACATTGATTATTGACTAGTTATTAATAGTAATCAATTACGGGG
TCATTAGTTCATAGCCCATATATGGAGTTCCGCGTTACATAACTTAC
GGTAAATGGCCCGCCTGGCTGACCGCCCAACGACCCCCGCCCATTGA
CGTCAATAATGACGTATGTTCCCATAGTAACGCCAATAGGGACTTTC
CATTGACGTCAATGGGTGGACTATTTACGGTAAACTGCCCACTTGGC
AGTACATCAAGTGTATCATATGCCAAGTACGCCCCCTATTGACGTCA
ATGACGGTAAATGGCCCGCCTGGCATTATGCCCAGTACATGACCTTA
TGGGACTTTCCTACTTGGCAGTACATCTACGTATTAGTCATCGCTAT
TACCATGGGTCGAGGTGAGCCCCACGTTCTGCTTCACTCTCCCCATC
TCCCCCCCCTCCCCACCCCCAATTTTGTATTTATTTATTTTTTAATT
ATTTTGTGCAGCGATGGGGGCGGGGGGGGGGGGGGCGCGCGCCAGGC
GGGGCGGGGCGGGGCGAGGGGCGGGGCGGGGCGAGGCGGAGAGGTGC
GGCGGCAGCCAATCAGAGCGGCGCGCTCCGAAAGTTTCCTTTTATGG
CGAGGCGGCGGCGGCGGCGGCCCTATAAAAAGCGAAGCGCGCGGCGG
GCGGGAGTCGCTGCGTTGCCTTCGCCCCGTGCCCCGCTCCGCGCCGC
CTCGCGCCGCCCGCCCCGGCTCTGACTGACCGCGTTACTCCCACAGG
TGAGCGGGCGGGACGGCCCTTCTCCTCCGGGCTGTAATTAGCGCTTG
GTTTAATGACGGCTCGTTTCTTTTCTGTGGCTGCGTGAAAGCCTTAA
AGGGCTCCGGGAGGGCCCTTTGTGCGGGGGGGAGCGGCTCGGGGGGT
GCGTGCGTGTGTGTGTGCGTGGGGAGCGCCGCGTGCGGCCCGCGCTG
CCCGGCGGCTGTGAGCGCTGCGGGCGCGGCGCGGGGCTTTGTGCGCT
CCGCGTGTGCGCGAGGGGAGCGCGGCCGGGGGCGGTGCCCCGCGGTG
CGGGGGGGCTGCGAGGGGAACAAAGGCTGCGTGCGGGGTGTGTGCGT
GGGGGGGTGAGCAGGGGGTGTGGGCGCGGCGGTCGGGCTGTAACCCC
CCCCTGCACCCCCCTCCCCGAGTTGCTGAGCACGGCCCGGCTTCGGG
TGCGGGGCTCCGTGCGGGGCGTGGCGCGGGGCTCGCCGTGCCGGGCG
GGGGGTGGCGGCAGGTGGGGGTGCCGGGCGGGGCGGGGCCGCCTCGG
GCCGGGGAGGGCTCGGGGGAGGGGCGCGGCGGCCCCCGGAGCGCCGG
CGGTGTCCCCAGAGAGCCCGCACCAGTGCCATCTGCTTGGCCGATTT
GAGAATCCTGATGGAGCGGCTTGTGTCTCTCCGCTCTGAGCCGGGCC
ATCAGATTCTCATATGGGAAAAGCAGGACCCGCAGCTGCGTCCGCCT
CCCCTGCATTCTAGAGCCTCTGCTAACCATGTTCATGCCTTCTTCTT
TTTCCTACAGCTCCTGGGCAACGTGCTGGTTATTGTGACCGGTCGCT
AGCCACCATGGTGAGCAAGGGCGAGGAGCTGTTCACCGGGGTGGTGC
CCATCCTGGTCGAGCTGGACGGCGACGTAAACGGCCACAAGTTCAGC
GTGTCCGGCGAGGGCGAGGGCGATGCCACCTACGGCAAGCTGACCCT
GAAGTTCATCTGCACCACCGGCAAGCTGCCCGTGCCCTGGCCCACCC
TCGTGACCACCCTGACCTACGGCGTGCAGTGCTTCAGCCGCTACCCC
GACCACATGAAGCAGCACGACTTCTTCAAGTCCGCCATGCCCGAAGG
CTACGTCCAGGAGCGCACCATCTTCTTCAAGGACGACGGCAACTACA
AGACCCGCGCCGAGGTGAAGTTCGAGGGCGACACCCTGGTGAACCGC
ATCGAGCTGAAGGGCATCGACTTCAAGGAGGACGGCAACATCCTGGG
GCACAAGCTGGAGTACAACTACAACAGCCACAACGTCTATATCATGG
CCGACAAGCAGAAGAACGGCATCAAGGTGAACTTCAAGATCCGCCAC
AACATCGAGGACGGCAGCGTGCAGCTCGCCGACCACTACCAGCAGAA
CACCCCCATCGGCGACGGCCCCGTGCTGCTGCCCGACAACCACTACC
TGAGCACCCAGTCCGCCCTGAGCAAAGACCCCAACGAGAAGCGCGAT
CACATGGTCCTGCTGGAGTTCGTGACCGCCGCCGGGATCACTCTCGG
CATGGACGAGCTGTACAAGTAACCTGCAGGCGCCGGCGGTGTCCCCA
GAGAGCCCGCACCAGTGCCATCTGCTTGGCCGATTTGAGAATCCTGA
TGGAGCGGCTTGTGTCTCTCCGCTCTGAGCCGGGCCATCAGATTCTC
ATATGGGAAAAGCAGGACCCGCAGCTGCGTCCGCCTCCCCTGCATGA
GCTCGCTGATCAGCCTCGACTGTGCCTTCTAGTTGCCAGCCATCTGT
TGTTTGCCCCTCCCCCGTGCCTTCCTTGACCCTGGAAGGTGCCACTC
CCACTGTCCTTTCCTAATAAAATGAGGAAATTGCATCGCATTGTCTG
AGTAGGTGTCATTCTATTCTGGGGGGTGGGGTGGGGCAGGACAGCAA
GGGGGAGGATTGGGAAGACAATAGCAGGCATGCTGGGGATGCGGTGG
GCTCTATGGAAGCTTGAATTCAGCTGACGTGCCTCGGACCGCTAGGA
ACCCCTAGTGATGGAGTTGGCCACTCCCTCTCTGCGCGCTCGCTCGC
TCACTGAGGCCGGGCGACCAAAGGTCGCCCGACGCCCGGGCTTTGCC
CGGGCGGCCTCAGTGAGCGAGCGAGCGCGCAG
Exemplary pITR.CAG.miR1-122_EGFP sequence
(SEQ ID NO: 239)
CCTGCAGGCAGCTGCGCGCTCGCTCGCTCACTGAGGCCGCCCGGGCG
TCGGGCGACCTTTGGTCGCCCGGCCTCAGTGAGCGAGCGAGCGCGCA
GAGAGGGAGTGGCCAACTCCATCACTAGGGGTTCCTGCGGCCGCACG
CGTGACATTGATTATTGACTAGTTATTAATAGTAATCAATTACGGGG
TCATTAGTTCATAGCCCATATATGGAGTTCCGCGTTACATAACTTAC
GGTAAATGGCCCGCCTGGCTGACCGCCCAACGACCCCCGCCCATTGA
CGTCAATAATGACGTATGTTCCCATAGTAACGCCAATAGGGACTTTC
CATTGACGTCAATGGGTGGACTATTTACGGTAAACTGCCCACTTGGC
AGTACATCAAGTGTATCATATGCCAAGTACGCCCCCTATTGACGTCA
ATGACGGTAAATGGCCCGCCTGGCATTATGCCCAGTACATGACCTTA
TGGGACTTTCCTACTTGGCAGTACATCTACGTATTAGTCATCGCTAT
TACCATGGGTCGAGGTGAGCCCCACGTTCTGCTTCACTCTCCCCATC
TCCCCCCCCTCCCCACCCCCAATTTTGTATTTATTTATTTTTTAATT
ATTTTGTGCAGCGATGGGGGCGGGGGGGGGGGGGGCGCGCGCCAGGC
GGGGCGGGGCGGGGCGAGGGGCGGGGCGGGGCGAGGCGGAGAGGTGC
GGCGGCAGCCAATCAGAGCGGCGCGCTCCGAAAGTTTCCTTTTATGG
CGAGGCGGCGGCGGCGGCGGCCCTATAAAAAGCGAAGCGCGCGGCGG
GCGGGAGTCGCTGCGTTGCCTTCGCCCCGTGCCCCGCTCCGCGCCGC
CTCGCGCCGCCCGCCCCGGCTCTGACTGACCGCGTTACTCCCACAGG
TGAGCGGGCGGGACGGCCCTTCTCCTCCGGGCTGTAATTAGCGCTTG
GTTTAATGACGGCTCGTTTCTTTTCTGTGGCTGCGTGAAAGCCTTAA
AGGGCTCCGGGAGGGCCCTTTGTGCGGGGGGGAGCGGCTCGGGGGGT
GCGTGCGTGTGTGTGTGCGTGGGGAGCGCCGCGTGCGGCCCGCGCTG
CCCGGCGGCTGTGAGCGCTGCGGGCGCGGCGCGGGGCTTTGTGCGCT
CCGCGTGTGCGCGAGGGGAGCGCGGCCGGGGGCGGTGCCCCGCGGTG
CGGGGGGGCTGCGAGGGGAACAAAGGCTGCGTGCGGGGTGTGTGCGT
GGGGGGGTGAGCAGGGGGTGTGGGCGCGGCGGTCGGGCTGTAACCCC
CCCCTGCACCCCCCTCCCCGAGTTGCTGAGCACGGCCCGGCTTCGGG
TGCGGGGCTCCGTGCGGGGCGTGGCGCGGGGCTCGCCGTGCCGGGCG
GGGGGTGGCGGCAGGTGGGGGTGCCGGGCGGGGCGGGGCCGCCTCGG
GCCGGGGAGGGCTCGGGGGAGGGGCGCGGCGGCCCCCGGAGCGCCGG
CGTGAAGTTAACACCTTCGTGGCTACAGAGTTTCCTTAGCAGAGCTG
TTGAGAATCCTGATGGAGCGGGTGTCTAAACTATCCCGCTCCATCCG
GATTCTACATAGCTACTGCTAGGCAATCCTTCCCTCGATAAATGTCT
TGGCATCGTCTAGAGCCTCTGCTAACCATGTTCATGCCTTCTTCTTT
TTCCTACAGCTCCTGGGCAACGTGCTGGTTATTGTGACCGGTCGCTA
GCCACCATGGTGAGCAAGGGCGAGGAGCTGTTCACCGGGGTGGTGCC
CATCCTGGTCGAGCTGGACGGCGACGTAAACGGCCACAAGTTCAGCG
TGTCCGGCGAGGGCGAGGGCGATGCCACCTACGGCAAGCTGACCCTG
AAGTTCATCTGCACCACCGGCAAGCTGCCCGTGCCCTGGCCCACCCT
CGTGACCACCCTGACCTACGGCGTGCAGTGCTTCAGCCGCTACCCCG
ACCACATGAAGCAGCACGACTTCTTCAAGTCCGCCATGCCCGAAGGC
TACGTCCAGGAGCGCACCATCTTCTTCAAGGACGACGGCAACTACAA
GACCCGCGCCGAGGTGAAGTTCGAGGGCGACACCCTGGTGAACCGCA
TCGAGCTGAAGGGCATCGACTTCAAGGAGGACGGCAACATCCTGGGG
CACAAGCTGGAGTACAACTACAACAGCCACAACGTCTATATCATGGC
CGACAAGCAGAAGAACGGCATCAAGGTGAACTTCAAGATCCGCCACA
ACATCGAGGACGGCAGCGTGCAGCTCGCCGACCACTACCAGCAGAAC
ACCCCCATCGGCGACGGCCCCGTGCTGCTGCCCGACAACCACTACCT
GAGCACCCAGTCCGCCCTGAGCAAAGACCCCAACGAGAAGCGCGATC
ACATGGTCCTGCTGGAGTTCGTGACCGCCGCCGGGATCACTCTCGGC
ATGGACGAGCTGTACAAGTAACCTGCAGGCGCCGGCGTGAAGTTAAC
ACCTTCGTGGCTACAGAGTTTCCTTAGCAGAGCTGTTGAGAATCCTG
ATGGAGCGGGTGTCTAAACTATCCCGCTCCATCCGGATTCTACATAG
CTACTGCTAGGCAATCCTTCCCTCGATAAATGTCTTGGCATCGGAGC
TCGCTGATCAGCCTCGACTGTGCCTTCTAGTTGCCAGCCATCTGTTG
TTTGCCCCTCCCCCGTGCCTTCCTTGACCCTGGAAGGTGCCACTCCC
ACTGTCCTTTCCTAATAAAATGAGGAAATTGCATCGCATTGTCTGAG
TAGGTGTCATTCTATTCTGGGGGGTGGGGTGGGGCAGGACAGCAAGG
GGGAGGATTGGGAAGACAATAGCAGGCATGCTGGGGATGCGGTGGGC
TCTATGGAAGCTTGAATTCAGCTGACGTGCCTCGGACCGCTAGGAAC
CCCTAGTGATGGAGTTGGCCACTCCCTCTCTGCGCGCTCGCTCGCTC
ACTGAGGCCGGGCGACCAAAGGTCGCCCGACGCCCGGGCTTTGCCCG
GGCGGCCTCAGTGAGCGAGCGAGCGCGCAG
Exemplary Construct name: pITR.CAG.miR1-135_EGFP
sequence
(SEQ ID NO: 240)
CCTGCAGGCAGCTGCGCGCTCGCTCGCTCACTGAGGCCGCCCGGGCG
TCGGGCGACCTTTGGTCGCCCGGCCTCAGTGAGCGAGCGAGCGCGCA
GAGAGGGAGTGGCCAACTCCATCACTAGGGGTTCCTGCGGCCGCACG
CGTGACATTGATTATTGACTAGTTATTAATAGTAATCAATTACGGGG
TCATTAGTTCATAGCCCATATATGGAGTTCCGCGTTACATAACTTAC
GGTAAATGGCCCGCCTGGCTGACCGCCCAACGACCCCCGCCCATTGA
CGTCAATAATGACGTATGTTCCCATAGTAACGCCAATAGGGACTTTC
CATTGACGTCAATGGGTGGACTATTTACGGTAAACTGCCCACTTGGC
AGTACATCAAGTGTATCATATGCCAAGTACGCCCCCTATTGACGTCA
ATGACGGTAAATGGCCCGCCTGGCATTATGCCCAGTACATGACCTTA
TGGGACTTTCCTACTTGGCAGTACATCTACGTATTAGTCATCGCTAT
TACCATGGGTCGAGGTGAGCCCCACGTTCTGCTTCACTCTCCCCATC
TCCCCCCCCTCCCCACCCCCAATTTTGTATTTATTTATTTTTTAATT
ATTTTGTGCAGCGATGGGGGCGGGGGGGGGGGGGGCGCGCGCCAGGC
GGGGCGGGGCGGGGCGAGGGGCGGGGCGGGGCGAGGCGGAGAGGTGC
GGCGGCAGCCAATCAGAGCGGCGCGCTCCGAAAGTTTCCTTTTATGG
CGAGGCGGCGGCGGCGGCGGCCCTATAAAAAGCGAAGCGCGCGGCGG
GCGGGAGTCGCTGCGTTGCCTTCGCCCCGTGCCCCGCTCCGCGCCGC
CTCGCGCCGCCCGCCCCGGCTCTGACTGACCGCGTTACTCCCACAGG
TGAGCGGGCGGGACGGCCCTTCTCCTCCGGGCTGTAATTAGCGCTTG
GTTTAATGACGGCTCGTTTCTTTTCTGTGGCTGCGTGAAAGCCTTAA
AGGGCTCCGGGAGGGCCCTTTGTGCGGGGGGGAGCGGCTCGGGGGGT
GCGTGCGTGTGTGTGTGCGTGGGGAGCGCCGCGTGCGGCCCGCGCTG
CCCGGCGGCTGTGAGCGCTGCGGGCGCGGCGCGGGGCTTTGTGCGCT
CCGCGTGTGCGCGAGGGGAGCGCGGCCGGGGGCGGTGCCCCGCGGTG
CGGGGGGGCTGCGAGGGGAACAAAGGCTGCGTGCGGGGTGTGTGCGT
GGGGGGGTGAGCAGGGGGTGTGGGCGCGGCGGTCGGGCTGTAACCCC
CCCCTGCACCCCCCTCCCCGAGTTGCTGAGCACGGCCCGGCTTCGGG
TGCGGGGCTCCGTGCGGGGCGTGGCGCGGGGCTCGCCGTGCCGGGCG
GGGGGTGGCGGCAGGTGGGGGTGCCGGGCGGGGCGGGGCCGCCTCGG
GCCGGGGAGGGCTCGGGGGAGGGGCGCGGCGGCCCCCGGAGCGCCGG
CGGCCGCTGGACCCCTCCACTCTGCTGTGGCCTTGAGAATCCTGATG
GAGCGGGATTGCTGTCCCAAACTCCCGCTCCATCGGATTCTCAAGGC
TACAGTGAGGGGCGAGCTCCTTCTCCTGCTCTAGAGCCTCTGCTAAC
CATGTTCATGCCTTCTTCTTTTTCCTACAGCTCCTGGGCAACGTGCT
GGTTATTGTGACCGGTCGCTAGCCACCATGGTGAGCAAGGGCGAGGA
GCTGTTCACCGGGGTGGTGCCCATCCTGGTCGAGCTGGACGGCGACG
TAAACGGCCACAAGTTCAGCGTGTCCGGCGAGGGCGAGGGCGATGCC
ACCTACGGCAAGCTGACCCTGAAGTTCATCTGCACCACCGGCAAGCT
GCCCGTGCCCTGGCCCACCCTCGTGACCACCCTGACCTACGGCGTGC
AGTGCTTCAGCCGCTACCCCGACCACATGAAGCAGCACGACTTCTTC
AAGTCCGCCATGCCCGAAGGCTACGTCCAGGAGCGCACCATCTTCTT
CAAGGACGACGGCAACTACAAGACCCGCGCCGAGGTGAAGTTCGAGG
GCGACACCCTGGTGAACCGCATCGAGCTGAAGGGCATCGACTTCAAG
GAGGACGGCAACATCCTGGGGCACAAGCTGGAGTACAACTACAACAG
CCACAACGTCTATATCATGGCCGACAAGCAGAAGAACGGCATCAAGG
TGAACTTCAAGATCCGCCACAACATCGAGGACGGCAGCGTGCAGCTC
GCCGACCACTACCAGCAGAACACCCCCATCGGCGACGGCCCCGTGCT
GCTGCCCGACAACCACTACCTGAGCACCCAGTCCGCCCTGAGCAAAG
ACCCCAACGAGAAGCGCGATCACATGGTCCTGCTGGAGTTCGTGACC
GCCGCCGGGATCACTCTCGGCATGGACGAGCTGTACAAGTAACCTGC
AGGCGCCGGCGGCCGCTGGACCCCTCCACTCTGCTGTGGCCTTGAGA
ATCCTGATGGAGCGGGATTGCTGTCCCAAACTCCCGCTCCATCGGAT
TCTCAAGGCTACAGTGAGGGGCGAGCTCCTTCTCCTGCGAGCTCGCT
GATCAGCCTCGACTGTGCCTTCTAGTTGCCAGCCATCTGTTGTTTGC
CCCTCCCCCGTGCCTTCCTTGACCCTGGAAGGTGCCACTCCCACTGT
CCTTTCCTAATAAAATGAGGAAATTGCATCGCATTGTCTGAGTAGGT
GTCATTCTATTCTGGGGGGTGGGGTGGGGCAGGACAGCAAGGGGGAG
GATTGGGAAGACAATAGCAGGCATGCTGGGGATGCGGTGGGCTCTAT
GGAAGCTTGAATTCAGCTGACGTGCCTCGGACCGCTAGGAACCCCTA
GTGATGGAGTTGGCCACTCCCTCTCTGCGCGCTCGCTCGCTCACTGA
GGCCGGGCGACCAAAGGTCGCCCGACGCCCGGGCTTTGCCCGGGCGG
CCTCAGTGAGCGAGCGAGCGCGCAG
Exemplary pITR.CAG.miR1-182_EGFP sequence
(SEQ ID NO: 241)
CCTGCAGGCAGCTGCGCGCTCGCTCGCTCACTGAGGCCGCCCGGGCG
TCGGGCGACCTTTGGTCGCCCGGCCTCAGTGAGCGAGCGAGCGCGCA
GAGAGGGAGTGGCCAACTCCATCACTAGGGGTTCCTGCGGCCGCACG
CGTGACATTGATTATTGACTAGTTATTAATAGTAATCAATTACGGGG
TCATTAGTTCATAGCCCATATATGGAGTTCCGCGTTACATAACTTAC
GGTAAATGGCCCGCCTGGCTGACCGCCCAACGACCCCCGCCCATTGA
CGTCAATAATGACGTATGTTCCCATAGTAACGCCAATAGGGACTTTC
CATTGACGTCAATGGGTGGACTATTTACGGTAAACTGCCCACTTGGC
AGTACATCAAGTGTATCATATGCCAAGTACGCCCCCTATTGACGTCA
ATGACGGTAAATGGCCCGCCTGGCATTATGCCCAGTACATGACCTTA
TGGGACTTTCCTACTTGGCAGTACATCTACGTATTAGTCATCGCTAT
TACCATGGGTCGAGGTGAGCCCCACGTTCTGCTTCACTCTCCCCATC
TCCCCCCCCTCCCCACCCCCAATTTTGTATTTATTTATTTTTTAATT
ATTTTGTGCAGCGATGGGGGCGGGGGGGGGGGGGGCGCGCGCCAGGC
GGGGCGGGGCGGGGCGAGGGGCGGGGCGGGGCGAGGCGGAGAGGTGC
GGCGGCAGCCAATCAGAGCGGCGCGCTCCGAAAGTTTCCTTTTATGG
CGAGGCGGCGGCGGCGGCGGCCCTATAAAAAGCGAAGCGCGCGGCGG
GCGGGAGTCGCTGCGTTGCCTTCGCCCCGTGCCCCGCTCCGCGCCGC
CTCGCGCCGCCCGCCCCGGCTCTGACTGACCGCGTTACTCCCACAGG
TGAGCGGGCGGGACGGCCCTTCTCCTCCGGGCTGTAATTAGCGCTTG
GTTTAATGACGGCTCGTTTCTTTTCTGTGGCTGCGTGAAAGCCTTAA
AGGGCTCCGGGAGGGCCCTTTGTGCGGGGGGGAGCGGCTCGGGGGGT
GCGTGCGTGTGTGTGTGCGTGGGGAGCGCCGCGTGCGGCCCGCGCTG
CCCGGCGGCTGTGAGCGCTGCGGGCGCGGCGCGGGGCTTTGTGCGCT
CCGCGTGTGCGCGAGGGGAGCGCGGCCGGGGGCGGTGCCCCGCGGTG
CGGGGGGGCTGCGAGGGGAACAAAGGCTGCGTGCGGGGTGTGTGCGT
GGGGGGGTGAGCAGGGGGTGTGGGCGCGGCGGTCGGGCTGTAACCCC
CCCCTGCACCCCCCTCCCCGAGTTGCTGAGCACGGCCCGGCTTCGGG
TGCGGGGCTCCGTGCGGGGCGTGGCGCGGGGCTCGCCGTGCCGGGCG
GGGGGTGGCGGCAGGTGGGGGTGCCGGGCGGGGCGGGGCCGCCTCGG
GCCGGGGAGGGCTCGGGGGAGGGGCGCGGCGGCCCCCGGAGCGCCGG
CGCTCCCCAGCTCCTGGGGGGAGCTGCTTGCCTCCCCCCGTTTTGAG
AATCCTGATGGAGCGGACTGGTGAGGTAACAGGATCCGCCGTCCATC
TTTATTCTCACTATGGGGCGAGGACTCAGCCGGCACCCTGTGCACAG
CCAGCGAGGGTCTAGAGCCTCTGCTAACCATGTTCATGCCTTCTTCT
TTTTCCTACAGCTCCTGGGCAACGTGCTGGTTATTGTGACCGGTCGC
TAGCCACCATGGTGAGCAAGGGCGAGGAGCTGTTCACCGGGGTGGTG
CCCATCCTGGTCGAGCTGGACGGCGACGTAAACGGCCACAAGTTCAG
CGTGTCCGGCGAGGGCGAGGGCGATGCCACCTACGGCAAGCTGACCC
TGAAGTTCATCTGCACCACCGGCAAGCTGCCCGTGCCCTGGCCCACC
CTCGTGACCACCCTGACCTACGGCGTGCAGTGCTTCAGCCGCTACCC
CGACCACATGAAGCAGCACGACTTCTTCAAGTCCGCCATGCCCGAAG
GCTACGTCCAGGAGCGCACCATCTTCTTCAAGGACGACGGCAACTAC
AAGACCCGCGCCGAGGTGAAGTTCGAGGGCGACACCCTGGTGAACCG
CATCGAGCTGAAGGGCATCGACTTCAAGGAGGACGGCAACATCCTGG
GGCACAAGCTGGAGTACAACTACAACAGCCACAACGTCTATATCATG
GCCGACAAGCAGAAGAACGGCATCAAGGTGAACTTCAAGATCCGCCA
CAACATCGAGGACGGCAGCGTGCAGCTCGCCGACCACTACCAGCAGA
ACACCCCCATCGGCGACGGCCCCGTGCTGCTGCCCGACAACCACTAC
CTGAGCACCCAGTCCGCCCTGAGCAAAGACCCCAACGAGAAGCGCGA
TCACATGGTCCTGCTGGAGTTCGTGACCGCCGCCGGGATCACTCTCG
GCATGGACGAGCTGTACAAGTAACCTGCAGGCGCCGGCGCTCCCCAG
CTCCTGGGGGGAGCTGCTTGCCTCCCCCCGTTTTGAGAATCCTGATG
GAGCGGACTGGTGAGGTAACAGGATCCGCCGTCCATCTTTATTCTCA
CTATGGGGCGAGGACTCAGCCGGCACCCTGTGCACAGCCAGCGAGGG
GAGCTCGCTGATCAGCCTCGACTGTGCCTTCTAGTTGCCAGCCATCT
GTTGTTTGCCCCTCCCCCGTGCCTTCCTTGACCCTGGAAGGTGCCAC
TCCCACTGTCCTTTCCTAATAAAATGAGGAAATTGCATCGCATTGTC
TGAGTAGGTGTCATTCTATTCTGGGGGGTGGGGTGGGGCAGGACAGC
AAGGGGGAGGATTGGGAAGACAATAGCAGGCATGCTGGGGATGCGGT
GGGCTCTATGGAAGCTTGAATTCAGCTGACGTGCCTCGGACCGCTAG
GAACCCCTAGTGATGGAGTTGGCCACTCCCTCTCTGCGCGCTCGCTC
GCTCACTGAGGCCGGGCGACCAAAGGTCGCCCGACGCCCGGGCTTTG
CCCGGGCGGCCTCAGTGAGCGAGCGAGCGCGCAG
Exemplary pITR.CAG.miR1-183_EGFP sequence
(SEQ ID NO: 242)
CCTGCAGGCAGCTGCGCGCTCGCTCGCTCACTGAGGCCGCCCGGGCG
TCGGGCGACCTTTGGTCGCCCGGCCTCAGTGAGCGAGCGAGCGCGCA
GAGAGGGAGTGGCCAACTCCATCACTAGGGGTTCCTGCGGCCGCACG
CGTGACATTGATTATTGACTAGTTATTAATAGTAATCAATTACGGGG
TCATTAGTTCATAGCCCATATATGGAGTTCCGCGTTACATAACTTAC
GGTAAATGGCCCGCCTGGCTGACCGCCCAACGACCCCCGCCCATTGA
CGTCAATAATGACGTATGTTCCCATAGTAACGCCAATAGGGACTTTC
CATTGACGTCAATGGGTGGACTATTTACGGTAAACTGCCCACTTGGC
AGTACATCAAGTGTATCATATGCCAAGTACGCCCCCTATTGACGTCA
ATGACGGTAAATGGCCCGCCTGGCATTATGCCCAGTACATGACCTTA
TGGGACTTTCCTACTTGGCAGTACATCTACGTATTAGTCATCGCTAT
TACCATGGGTCGAGGTGAGCCCCACGTTCTGCTTCACTCTCCCCATC
TCCCCCCCCTCCCCACCCCCAATTTTGTATTTATTTATTTTTTAATT
ATTTTGTGCAGCGATGGGGGCGGGGGGGGGGGGGGCGCGCGCCAGGC
GGGGCGGGGCGGGGCGAGGGGCGGGGCGGGGCGAGGCGGAGAGGTGC
GGCGGCAGCCAATCAGAGCGGCGCGCTCCGAAAGTTTCCTTTTATGG
CGAGGCGGCGGCGGCGGCGGCCCTATAAAAAGCGAAGCGCGCGGCGG
GCGGGAGTCGCTGCGTTGCCTTCGCCCCGTGCCCCGCTCCGCGCCGC
CTCGCGCCGCCCGCCCCGGCTCTGACTGACCGCGTTACTCCCACAGG
TGAGCGGGCGGGACGGCCCTTCTCCTCCGGGCTGTAATTAGCGCTTG
GTTTAATGACGGCTCGTTTCTTTTCTGTGGCTGCGTGAAAGCCTTAA
AGGGCTCCGGGAGGGCCCTTTGTGCGGGGGGGAGCGGCTCGGGGGGT
GCGTGCGTGTGTGTGTGCGTGGGGAGCGCCGCGTGCGGCCCGCGCTG
CCCGGCGGCTGTGAGCGCTGCGGGCGCGGCGCGGGGCTTTGTGCGCT
CCGCGTGTGCGCGAGGGGAGCGCGGCCGGGGGCGGTGCCCCGCGGTG
CGGGGGGGCTGCGAGGGGAACAAAGGCTGCGTGCGGGGTGTGTGCGT
GGGGGGGTGAGCAGGGGGTGTGGGCGCGGCGGTCGGGCTGTAACCCC
CCCCTGCACCCCCCTCCCCGAGTTGCTGAGCACGGCCCGGCTTCGGG
TGCGGGGCTCCGTGCGGGGCGTGGCGCGGGGCTCGCCGTGCCGGGCG
GGGGGTGGCGGCAGGTGGGGGTGCCGGGCGGGGCGGGGCCGCCTCGG
GCCGGGGAGGGCTCGGGGGAGGGGCGCGGCGGCCCCCGGAGCGCCGG
CGAGGGTCGGCAGGCCGCAGAGTGTGACTCCTGTTCTGTGTTTGAGA
ATCCTGATGGAGCGGGTGAACAGTCTCAGTCCCGCTCCCAGGAAATG
GTCAAAAACAGAGCAGAGACAGATCCACGAGGGCCTCCGGAGCACCT
TTCTAGAGCCTCTGCTAACCATGTTCATGCCTTCTTCTTTTTCCTAC
AGCTCCTGGGCAACGTGCTGGTTATTGTGACCGGTCGCTAGCCACCA
TGGTGAGCAAGGGCGAGGAGCTGTTCACCGGGGTGGTGCCCATCCTG
GTCGAGCTGGACGGCGACGTAAACGGCCACAAGTTCAGCGTGTCCGG
CGAGGGCGAGGGCGATGCCACCTACGGCAAGCTGACCCTGAAGTTCA
TCTGCACCACCGGCAAGCTGCCCGTGCCCTGGCCCACCCTCGTGACC
ACCCTGACCTACGGCGTGCAGTGCTTCAGCCGCTACCCCGACCACAT
GAAGCAGCACGACTTCTTCAAGTCCGCCATGCCCGAAGGCTACGTCC
AGGAGCGCACCATCTTCTTCAAGGACGACGGCAACTACAAGACCCGC
GCCGAGGTGAAGTTCGAGGGCGACACCCTGGTGAACCGCATCGAGCT
GAAGGGCATCGACTTCAAGGAGGACGGCAACATCCTGGGGCACAAGC
TGGAGTACAACTACAACAGCCACAACGTCTATATCATGGCCGACAAG
CAGAAGAACGGCATCAAGGTGAACTTCAAGATCCGCCACAACATCGA
GGACGGCAGCGTGCAGCTCGCCGACCACTACCAGCAGAACACCCCCA
TCGGCGACGGCCCCGTGCTGCTGCCCGACAACCACTACCTGAGCACC
CAGTCCGCCCTGAGCAAAGACCCCAACGAGAAGCGCGATCACATGGT
CCTGCTGGAGTTCGTGACCGCCGCCGGGATCACTCTCGGCATGGACG
AGCTGTACAAGTAACCTGCAGGCGCCGGCGAGGGTCGGCAGGCCGCA
GAGTGTGACTCCTGTTCTGTGTTTGAGAATCCTGATGGAGCGGGTGA
ACAGTCTCAGTCCCGCTCCCAGGAAATGGTCAAAAACAGAGCAGAGA
CAGATCCACGAGGGCCTCCGGAGCACCTTGAGCTCGCTGATCAGCCT
CGACTGTGCCTTCTAGTTGCCAGCCATCTGTTGTTTGCCCCTCCCCC
GTGCCTTCCTTGACCCTGGAAGGTGCCACTCCCACTGTCCTTTCCTA
ATAAAATGAGGAAATTGCATCGCATTGTCTGAGTAGGTGTCATTCTA
TTCTGGGGGGTGGGGTGGGGCAGGACAGCAAGGGGGAGGATTGGGAA
GACAATAGCAGGCATGCTGGGGATGCGGTGGGCTCTATGGAAGCTTG
AATTCAGCTGACGTGCCTCGGACCGCTAGGAACCCCTAGTGATGGAG
TTGGCCACTCCCTCTCTGCGCGCTCGCTCGCTCACTGAGGCCGGGCG
ACCAAAGGTCGCCCGACGCCCGGGCTTTGCCCGGGCGGCCTCAGTGA
GCGAGCGAGCGCGCAG
Exemplary pITR.CAG.miR1-335_EGFP sequence
(SEQ ID NO: 243)
CCTGCAGGCAGCTGCGCGCTCGCTCGCTCACTGAGGCCGCCCGGGCG
TCGGGCGACCTTTGGTCGCCCGGCCTCAGTGAGCGAGCGAGCGCGCA
GAGAGGGAGTGGCCAACTCCATCACTAGGGGTTCCTGCGGCCGCACG
CGTGACATTGATTATTGACTAGTTATTAATAGTAATCAATTACGGGG
TCATTAGTTCATAGCCCATATATGGAGTTCCGCGTTACATAACTTAC
GGTAAATGGCCCGCCTGGCTGACCGCCCAACGACCCCCGCCCATTGA
CGTCAATAATGACGTATGTTCCCATAGTAACGCCAATAGGGACTTTC
CATTGACGTCAATGGGTGGACTATTTACGGTAAACTGCCCACTTGGC
AGTACATCAAGTGTATCATATGCCAAGTACGCCCCCTATTGACGTCA
ATGACGGTAAATGGCCCGCCTGGCATTATGCCCAGTACATGACCTTA
TGGGACTTTCCTACTTGGCAGTACATCTACGTATTAGTCATCGCTAT
TACCATGGGTCGAGGTGAGCCCCACGTTCTGCTTCACTCTCCCCATC
TCCCCCCCCTCCCCACCCCCAATTTTGTATTTATTTATTTTTTAATT
ATTTTGTGCAGCGATGGGGGCGGGGGGGGGGGGGGCGCGCGCCAGGC
GGGGCGGGGCGGGGCGAGGGGCGGGGCGGGGCGAGGCGGAGAGGTGC
GGCGGCAGCCAATCAGAGCGGCGCGCTCCGAAAGTTTCCTTTTATGG
CGAGGCGGCGGCGGCGGCGGCCCTATAAAAAGCGAAGCGCGCGGCGG
GCGGGAGTCGCTGCGTTGCCTTCGCCCCGTGCCCCGCTCCGCGCCGC
CTCGCGCCGCCCGCCCCGGCTCTGACTGACCGCGTTACTCCCACAGG
TGAGCGGGCGGGACGGCCCTTCTCCTCCGGGCTGTAATTAGCGCTTG
GTTTAATGACGGCTCGTTTCTTTTCTGTGGCTGCGTGAAAGCCTTAA
AGGGCTCCGGGAGGGCCCTTTGTGCGGGGGGGAGCGGCTCGGGGGGT
GCGTGCGTGTGTGTGTGCGTGGGGAGCGCCGCGTGCGGCCCGCGCTG
CCCGGCGGCTGTGAGCGCTGCGGGCGCGGCGCGGGGCTTTGTGCGCT
CCGCGTGTGCGCGAGGGGAGCGCGGCCGGGGGCGGTGCCCCGCGGTG
CGGGGGGGCTGCGAGGGGAACAAAGGCTGCGTGCGGGGTGTGTGCGT
GGGGGGGTGAGCAGGGGGTGTGGGCGCGGCGGTCGGGCTGTAACCCC
CCCCTGCACCCCCCTCCCCGAGTTGCTGAGCACGGCCCGGCTTCGGG
TGCGGGGCTCCGTGCGGGGCGTGGCGCGGGGCTCGCCGTGCCGGGCG
GGGGGTGGCGGCAGGTGGGGGTGCCGGGCGGGGCGGGGCCGCCTCGG
GCCGGGGAGGGCTCGGGGGAGGGGCGCGGCGGCCCCCGGAGCGCCGG
CGGAAACAGATTGGAAATGATTTGTTTTGAGCGGGGGTTGAGAATCC
TGATGGAGCGGGTTTGTCATAAACCCCGCTCCCTCAGGATTCCCAAC
CTCCTCTCATTTGCTATATTCAATTAAGTAATCTAGAGCCTCTGCTA
ACCATGTTCATGCCTTCTTCTTTTTCCTACAGCTCCTGGGCAACGTG
CTGGTTATTGTGACCGGTCGCTAGCCACCATGGTGAGCAAGGGCGAG
GAGCTGTTCACCGGGGTGGTGCCCATCCTGGTCGAGCTGGACGGCGA
CGTAAACGGCCACAAGTTCAGCGTGTCCGGCGAGGGCGAGGGCGATG
CCACCTACGGCAAGCTGACCCTGAAGTTCATCTGCACCACCGGCAAG
CTGCCCGTGCCCTGGCCCACCCTCGTGACCACCCTGACCTACGGCGT
GCAGTGCTTCAGCCGCTACCCCGACCACATGAAGCAGCACGACTTCT
TCAAGTCCGCCATGCCCGAAGGCTACGTCCAGGAGCGCACCATCTTC
TTCAAGGACGACGGCAACTACAAGACCCGCGCCGAGGTGAAGTTCGA
GGGCGACACCCTGGTGAACCGCATCGAGCTGAAGGGCATCGACTTCA
AGGAGGACGGCAACATCCTGGGGCACAAGCTGGAGTACAACTACAAC
AGCCACAACGTCTATATCATGGCCGACAAGCAGAAGAACGGCATCAA
GGTGAACTTCAAGATCCGCCACAACATCGAGGACGGCAGCGTGCAGC
TCGCCGACCACTACCAGCAGAACACCCCCATCGGCGACGGCCCCGTG
CTGCTGCCCGACAACCACTACCTGAGCACCCAGTCCGCCCTGAGCAA
AGACCCCAACGAGAAGCGCGATCACATGGTCCTGCTGGAGTTCGTGA
CCGCCGCCGGGATCACTCTCGGCATGGACGAGCTGTACAAGTAACCT
GCAGGCGCCGGCGGAAACAGATTGGAAATGATTTGTTTTGAGCGGGG
GTTGAGAATCCTGATGGAGCGGGTTTGTCATAAACCCCGCTCCCTCA
GGATTCCCAACCTCCTCTCATTTGCTATATTCAATTAAGTAAGAGCT
CGCTGATCAGCCTCGACTGTGCCTTCTAGTTGCCAGCCATCTGTTGT
TTGCCCCTCCCCCGTGCCTTCCTTGACCCTGGAAGGTGCCACTCCCA
CTGTCCTTTCCTAATAAAATGAGGAAATTGCATCGCATTGTCTGAGT
AGGTGTCATTCTATTCTGGGGGGTGGGGTGGGGCAGGACAGCAAGGG
GGAGGATTGGGAAGACAATAGCAGGCATGCTGGGGATGCGGTGGGCT
CTATGGAAGCTTGAATTCAGCTGACGTGCCTCGGACCGCTAGGAACC
CCTAGTGATGGAGTTGGCCACTCCCTCTCTGCGCGCTCGCTCGCTCA
CTGAGGCCGGGCGACCAAAGGTCGCCCGACGCCCGGGCTTTGCCCGG
GCGGCCTCAGTGAGCGAGCGAGCGCGCAG
Exemplary pITR.CAG.miR1-451_EGFP sequence
(SEQ ID NO: 244)
CCTGCAGGCAGCTGCGCGCTCGCTCGCTCACTGAGGCCGCCCGGGCG
TCGGGCGACCTTTGGTCGCCCGGCCTCAGTGAGCGAGCGAGCGCGCA
GAGAGGGAGTGGCCAACTCCATCACTAGGGGTTCCTGCGGCCGCACG
CGTGACATTGATTATTGACTAGTTATTAATAGTAATCAATTACGGGG
TCATTAGTTCATAGCCCATATATGGAGTTCCGCGTTACATAACTTAC
GGTAAATGGCCCGCCTGGCTGACCGCCCAACGACCCCCGCCCATTGA
CGTCAATAATGACGTATGTTCCCATAGTAACGCCAATAGGGACTTTC
CATTGACGTCAATGGGTGGACTATTTACGGTAAACTGCCCACTTGGC
AGTACATCAAGTGTATCATATGCCAAGTACGCCCCCTATTGACGTCA
ATGACGGTAAATGGCCCGCCTGGCATTATGCCCAGTACATGACCTTA
TGGGACTTTCCTACTTGGCAGTACATCTACGTATTAGTCATCGCTAT
TACCATGGGTCGAGGTGAGCCCCACGTTCTGCTTCACTCTCCCCATC
TCCCCCCCCTCCCCACCCCCAATTTTGTATTTATTTATTTTTTAATT
ATTTTGTGCAGCGATGGGGGCGGGGGGGGGGGGGGCGCGCGCCAGGC
GGGGCGGGGCGGGGCGAGGGGCGGGGCGGGGCGAGGCGGAGAGGTGC
GGCGGCAGCCAATCAGAGCGGCGCGCTCCGAAAGTTTCCTTTTATGG
CGAGGCGGCGGCGGCGGCGGCCCTATAAAAAGCGAAGCGCGCGGCGG
GCGGGAGTCGCTGCGTTGCCTTCGCCCCGTGCCCCGCTCCGCGCCGC
CTCGCGCCGCCCGCCCCGGCTCTGACTGACCGCGTTACTCCCACAGG
TGAGCGGGCGGGACGGCCCTTCTCCTCCGGGCTGTAATTAGCGCTTG
GTTTAATGACGGCTCGTTTCTTTTCTGTGGCTGCGTGAAAGCCTTAA
AGGGCTCCGGGAGGGCCCTTTGTGCGGGGGGGAGCGGCTCGGGGGGT
GCGTGCGTGTGTGTGTGCGTGGGGAGCGCCGCGTGCGGCCCGCGCTG
CCCGGCGGCTGTGAGCGCTGCGGGCGCGGCGCGGGGCTTTGTGCGCT
CCGCGTGTGCGCGAGGGGAGCGCGGCCGGGGGCGGTGCCCCGCGGTG
CGGGGGGGCTGCGAGGGGAACAAAGGCTGCGTGCGGGGTGTGTGCGT
GGGGGGGTGAGCAGGGGGTGTGGGCGCGGCGGTCGGGCTGTAACCCC
CCCCTGCACCCCCCTCCCCGAGTTGCTGAGCACGGCCCGGCTTCGGG
TGCGGGGCTCCGTGCGGGGCGTGGCGCGGGGCTCGCCGTGCCGGGCG
GGGGGTGGCGGCAGGTGGGGGTGCCGGGCGGGGCGGGGCCGCCTCGG
GCCGGGGAGGGCTCGGGGGAGGGGCGCGGCGGCCCCCGGAGCGCCGG
CGTGACTGCCAGGGCACTTGGGAATGGCAAGGTTGAGAATCCTGATG
GAGCGGATTCCATCAGGATTCTCAGTCTTGCTATACCCAGAAAACGT
GCCAGGAAGATCTAGAGCCTCTGCTAACCATGTTCATGCCTTCTTCT
TTTTCCTACAGCTCCTGGGCAACGTGCTGGTTATTGTGACCGGTCGC
TAGCCACCATGGTGAGCAAGGGCGAGGAGCTGTTCACCGGGGTGGTG
CCCATCCTGGTCGAGCTGGACGGCGACGTAAACGGCCACAAGTTCAG
CGTGTCCGGCGAGGGCGAGGGCGATGCCACCTACGGCAAGCTGACCC
TGAAGTTCATCTGCACCACCGGCAAGCTGCCCGTGCCCTGGCCCACC
CTCGTGACCACCCTGACCTACGGCGTGCAGTGCTTCAGCCGCTACCC
CGACCACATGAAGCAGCACGACTTCTTCAAGTCCGCCATGCCCGAAG
GCTACGTCCAGGAGCGCACCATCTTCTTCAAGGACGACGGCAACTAC
AAGACCCGCGCCGAGGTGAAGTTCGAGGGCGACACCCTGGTGAACCG
CATCGAGCTGAAGGGCATCGACTTCAAGGAGGACGGCAACATCCTGG
GGCACAAGCTGGAGTACAACTACAACAGCCACAACGTCTATATCATG
GCCGACAAGCAGAAGAACGGCATCAAGGTGAACTTCAAGATCCGCCA
CAACATCGAGGACGGCAGCGTGCAGCTCGCCGACCACTACCAGCAGA
ACACCCCCATCGGCGACGGCCCCGTGCTGCTGCCCGACAACCACTAC
CTGAGCACCCAGTCCGCCCTGAGCAAAGACCCCAACGAGAAGCGCGA
TCACATGGTCCTGCTGGAGTTCGTGACCGCCGCCGGGATCACTCTCG
GCATGGACGAGCTGTACAAGTAACCTGCAGGCGCCGGCGTGACTGCC
AGGGCACTTGGGAATGGCAAGGTTGAGAATCCTGATGGAGCGGATTC
CATCAGGATTCTCAGTCTTGCTATACCCAGAAAACGTGCCAGGAAGA
GAGCTCGCTGATCAGCCTCGACTGTGCCTTCTAGTTGCCAGCCATCT
GTTGTTTGCCCCTCCCCCGTGCCTTCCTTGACCCTGGAAGGTGCCAC
TCCCACTGTCCTTTCCTAATAAAATGAGGAAATTGCATCGCATTGTC
TGAGTAGGTGTCATTCTATTCTGGGGGGTGGGGTGGGGCAGGACAGC
AAGGGGGAGGATTGGGAAGACAATAGCAGGCATGCTGGGGATGCGGT
GGGCTCTATGGAAGCTTGAATTCAGCTGACGTGCCTCGGACCGCTAG
GAACCCCTAGTGATGGAGTTGGCCACTCCCTCTCTGCGCGCTCGCTC
GCTCACTGAGGCCGGGCGACCAAAGGTCGCCCGACGCCCGGGCTTTG
CCCGGGCGGCCTCAGTGAGCGAGCGAGCGCGCAG

[0368] Exemplary miRNA Construct Sequences (Part 4)

Exemplary pITR.CAG.mmu.miR6-26 EGFP
(SEQ ID NO: 245)
CTGCGCGCTCGCTCGCTCACTGAGGCCGCCCGGGCGTCGGGCGACCTTTGGTCGCCCGGCCTCA
GTGAGCGAGCGAGCGCGCAGAGAGGGAGTGGCCAACTCCATCACTAGGGGTTCCTGCGGCCGCA
CGCGTGACATTGATTATTGACTAGTTATTAATAGTAATCAATTACGGGGTCATTAGTTCATAGC
CCATATATGGAGTTCCGCGTTACATAACTTACGGTAAATGGCCCGCCTGGCTGACCGCCCAACG
ACCCCCGCCCATTGACGTCAATAATGACGTATGTTCCCATAGTAACGCCAATAGGGACTTTCCA
TTGACGTCAATGGGTGGACTATTTACGGTAAACTGCCCACTTGGCAGTACATCAAGTGTATCAT
ATGCCAAGTACGCCCCCTATTGACGTCAATGACGGTAAATGGCCCGCCTGGCATTATGCCCAGT
ACATGACCTTATGGGACTTTCCTACTTGGCAGTACATCTACGTATTAGTCATCGCTATTACCAT
GGGTCGAGGTGAGCCCCACGTTCTGCTTCACTCTCCCCATCTCCCCCCCCTCCCCACCCCCAAT
TTTGTATTTATTTATTTTTTAATTATTTTGTGCAGCGATGGGGGCGGGGGGGGGGGGGGCGCGC
GCCAGGCGGGGCGGGGCGGGGCGAGGGGCGGGGCGGGGCGAGGCGGAGAGGTGCGGCGGCAGCC
AATCAGAGCGGCGCGCTCCGAAAGTTTCCTTTTATGGCGAGGCGGCGGCGGCGGCGGCCCTATA
AAAAGCGAAGCGCGCGGCGGGCGGGAGTCGCTGCGTTGCCTTCGCCCCGTGCCCCGCTCCGCGC
CGCCTCGCGCCGCCCGCCCCGGCTCTGACTGACCGCGTTACTCCCACAGGTGAGCGGGCGGGAC
GGCCCTTCTCCTCCGGGCTGTAATTAGCGCTTGGTTTAATGACGGCTCGTTTCTTTTCTGTGGC
TGCGTGAAAGCCTTAAAGGGCTCCGGGAGGGCCCTTTGTGCGGGGGGGAGCGGCTCGGGGGGTG
CGTGCGTGTGTGTGTGCGTGGGGAGCGCCGCGTGCGGCCCGCGCTGCCCGGCGGCTGTGAGCGC
TGCGGGCGCGGCGCGGGGCTTTGTGCGCTCCGCGTGTGCGCGAGGGGAGCGCGGCCGGGGGCGG
TGCCCCGCGGTGCGGGGGGGCTGCGAGGGGAACAAAGGCTGCGTGCGGGGTGTGTGCGTGGGGG
GGTGAGCAGGGGGTGTGGGCGCGGCGGTCGGGCTGTAACCCCCCCCTGCACCCCCCTCCCCGAG
TTGCTGAGCACGGCCCGGCTTCGGGTGCGGGGCTCCGTGCGGGGCGTGGCGCGGGGCTCGCCGT
GCCGGGCGGGGGGTGGCGGCAGGTGGGGGTGCCGGGCGGGGCGGGGCCGCCTCGGGCCGGGGAG
GGCTCGGGGGAGGGGCGCGGCGGCCCCCGGAGCGCCGGCGGAGCAGGAGGACCAAGGCCCTGGC
GAAGGCCGTGGCCTCGATGCTGTCATAGTAATACCAGTGTGCAGGTCCCAATGGCTGGTATTAA
TGTGACAGTCTCGGGGACGCGGGCCTGGACGCCGGCATCCGGGCTCAGGACCCCCCTCTCTAGA
GCCTCTGCTAACCATGTTCATGCCTTCTTCTTTTTCCTACAGCTCCTGGGCAACGTGCTGGTTA
TTGTGACCGGTCGCTAGCCACCATGGTGAGCAAGGGCGAGGAGCTGTTCACCGGGGTGGTGCCC
ATCCTGGTCGAGCTGGACGGCGACGTAAACGGCCACAAGTTCAGCGTGTCCGGCGAGGGCGAGG
GCGATGCCACCTACGGCAAGCTGACCCTGAAGTTCATCTGCACCACCGGCAAGCTGCCCGTGCC
CTGGCCCACCCTCGTGACCACCCTGACCTACGGCGTGCAGTGCTTCAGCCGCTACCCCGACCAC
ATGAAGCAGCACGACTTCTTCAAGTCCGCCATGCCCGAAGGCTACGTCCAGGAGCGCACCATCT
TCTTCAAGGACGACGGCAACTACAAGACCCGCGCCGAGGTGAAGTTCGAGGGCGACACCCTGGT
GAACCGCATCGAGCTGAAGGGCATCGACTTCAAGGAGGACGGCAACATCCTGGGGCACAAGCTG
GAGTACAACTACAACAGCCACAACGTCTATATCATGGCCGACAAGCAGAAGAACGGCATCAAGG
TGAACTTCAAGATCCGCCACAACATCGAGGACGGCAGCGTGCAGCTCGCCGACCACTACCAGCA
GAACACCCCCATCGGCGACGGCCCCGTGCTGCTGCCCGACAACCACTACCTGAGCACCCAGTCC
GCCCTGAGCAAAGACCCCAACGAGAAGCGCGATCACATGGTCCTGCTGGAGTTCGTGACCGCCG
CCGGGATCACTCTCGGCATGGACGAGCTGTACAAGTAAcctgcaggcgccggcgGAGCAGGAGG
ACCAAGGCCCTGGCGAAGGCCGTGGCCTCGATGCTGTCATAGTAATACCAGTGTGCAGGTCCCA
ATGGCTGGTATTAATGTGACAGTCTCGGGGACGCGGGCCTGGACGCCGGCATCCGGGCTCAGGA
CCCCCCTCGAGCTCGCTGATCAGCCTCGACTGTGCCTTCTAGTTGCCAGCCATCTGTTGTTTGC
CCCTCCCCCGTGCCTTCCTTGACCCTGGAAGGTGCCACTCCCACTGTCCTTTCCTAATAAAATG
AGGAAATTGCATCGCATTGTCTGAGTAGGTGTCATTCTATTCTGGGGGGTGGGGTGGGGCAGGA
CAGCAAGGGGGAGGATTGGGAAGACAATAGCAGGCATGCTGGGGATGCGGTGGGCTCTATGGAA
GCTTGAATTCAGCTGACGTGCCTCGGACCGCTAGGAACCCCTAGTGATGGAGTTGGCCACTCCC
TCTCTGCGCGCTCGCTCGCTCACTGAGGCCGGGCGACCAAAGGTCGCCCGACGCCCGGGCTTTG
CCCGGGCGGCCTCAGTGAGCGAGCGAGCGCGCAG
Exemplary pITR.CAG.mmu.miR6-26_KCNQ4codop
(SEQ ID NO: 246)
CTGCGCGCTCGCTCGCTCACTGAGGCCGCCCGGGCGTCGGGCGACCTTTGGTCGCCCGGCCTCA
GTGAGCGAGCGAGCGCGCAGAGAGGGAGTGGCCAACTCCATCACTAGGGGTTCCTGCGGCCGCA
CGCGTGACATTGATTATTGACTAGTTATTAATAGTAATCAATTACGGGGTCATTAGTTCATAGC
CCATATATGGAGTTCCGCGTTACATAACTTACGGTAAATGGCCCGCCTGGCTGACCGCCCAACG
ACCCCCGCCCATTGACGTCAATAATGACGTATGTTCCCATAGTAACGCCAATAGGGACTTTCCA
TTGACGTCAATGGGTGGACTATTTACGGTAAACTGCCCACTTGGCAGTACATCAAGTGTATCAT
ATGCCAAGTACGCCCCCTATTGACGTCAATGACGGTAAATGGCCCGCCTGGCATTATGCCCAGT
ACATGACCTTATGGGACTTTCCTACTTGGCAGTACATCTACGTATTAGTCATCGCTATTACCAT
GGGTCGAGGTGAGCCCCACGTTCTGCTTCACTCTCCCCATCTCCCCCCCCTCCCCACCCCCAAT
TTTGTATTTATTTATTTTTTAATTATTTTGTGCAGCGATGGGGGCGGGGGGGGGGGGGGCGCGC
GCCAGGCGGGGCGGGGCGGGGCGAGGGGCGGGGCGGGGCGAGGCGGAGAGGTGCGGCGGCAGCC
AATCAGAGCGGCGCGCTCCGAAAGTTTCCTTTTATGGCGAGGCGGCGGCGGCGGCGGCCCTATA
AAAAGCGAAGCGCGCGGCGGGCGGGAGTCGCTGCGTTGCCTTCGCCCCGTGCCCCGCTCCGCGC
CGCCTCGCGCCGCCCGCCCCGGCTCTGACTGACCGCGTTACTCCCACAGGTGAGCGGGCGGGAC
GGCCCTTCTCCTCCGGGCTGTAATTAGCGCTTGGTTTAATGACGGCTCGTTTCTTTTCTGTGGC
TGCGTGAAAGCCTTAAAGGGCTCCGGGAGGGCCCTTTGTGCGGGGGGGAGCGGCTCGGGGGGTG
CGTGCGTGTGTGTGTGCGTGGGGAGCGCCGCGTGCGGCCCGCGCTGCCCGGCGGCTGTGAGCGC
TGCGGGCGCGGCGCGGGGCTTTGTGCGCTCCGCGTGTGCGCGAGGGGAGCGCGGCCGGGGGCGG
TGCCCCGCGGTGCGGGGGGGCTGCGAGGGGAACAAAGGCTGCGTGCGGGGTGTGTGCGTGGGGG
GGTGAGCAGGGGGTGTGGGCGCGGCGGTCGGGCTGTAACCCCCCCCTGCACCCCCCTCCCCGAG
TTGCTGAGCACGGCCCGGCTTCGGGTGCGGGGCTCCGTGCGGGGCGTGGCGCGGGGCTCGCCGT
GCCGGGCGGGGGGTGGCGGCAGGTGGGGGTGCCGGGCGGGGCGGGGCCGCCTCGGGCCGGGGAG
GGCTCGGGGGAGGGGCGCGGCGGCCCCCGGAGCGCCGGCGGAGCAGGAGGACCAAGGCCCTGGC
GAAGGCCGTGGCCTCGATGCTGTCATAGTAATACCAGTGTGCAGGTCCCAATGGCTGGTATTAA
TGTGACAGTCTCGGGGACGCGGGCCTGGACGCCGGCATCCGGGCTCAGGACCCCCCTCTCTAGA
GCCTCTGCTAACCATGTTCATGCCTTCTTCTTTTTCCTACAGCTCCTGGGCAACGTGCTGGTTA
TTGTGACCGGTCGCTAGCCACCATGGCTGAAGCCCCTCCTAGAAGGCTTGGACTGGGACCTCCT
CCTGGGGATGCTCCTAGAGCTGAACTGGTGGCTCTGACAGCCGTGCAGTCTGAACAAGGCGAAG
CTGGTGGCGGCGGATCTCCACGTAGACTTGGACTGCTGGGAAGCCCTCTTCCTCCTGGTGCTCC
ACTTCCTGGACCTGGCAGTGGATCTGGATCTGCCTGTGGCCAGAGAAGCTCTGCCGCTCACAAG
AGATACCGGCGGCTGCAGAACTGGGTGTACAACGTGCTGGAAAGACCCAGAGGCTGGGCCTTCG
TGTACCACGTGTTCATCTTTCTGCTGGTGTTCAGCTGCCTGGTGCTGTCCGTGCTGAGCACCAT
CCAAGAACATCAAGAGCTGGCTAACGAGTGCCTGTTAATACTGGAGTTTGTGATGATTGTGGTG
TTCGGCCTCGAGTACATCGTCCGCGTTTGGAGCGCCGGCTGCTGCTGCAGATATAGAGGTTGGC
AAGGCAGATTCCGCTTCGCCAGAAAGCCCTTCTGCGTGATCGACTTCATCGTGTTCGTGGCCAG
CGTGGCCGTGATTGCTGCTGGCACACAGGGCAACATCTTCGCCACAAGCGCCCTGCGGAGCATG
CGGTTTCTGCAGATCCTGAGAATGGTCCGAATGGACAGAAGAGGCGGCACCTGGAAGCTGCTGG
GCTCTGTGGTGTACGCCCACAGCAAAGAGCTGATCACCGCCTGGTACATCGGATTTCTGGTGCT
GATCTTCGCCTCCTTCCTGGTGTACCTGGCCGAGAAGGACGCCAACAGCGACTTTAGCAGCTAC
GCCGACTCTCTTTGGTGGGGCACCATCACACTGACCACCATCGGCTACGGCGACAAGACCCCTC
ACACATGGCTGGGAAGAGTGCTGGCCGCTGGATTTGCTCTGCTGGGCATCAGCTTTTTCGCCCT
GCCTGCCGGAATCCTCGGATCTGGCTTTGCCCTGAAGGTGCAAGAGCAGCATAGACAAAAGCAT
TTTGAAAAGAGAAGAATGCCTGCCGCCAACCTGATTCAGGCCGCTTGGAGACTGTACAGCACCG
ACATGAGCAGAGCCTACCTGACCGCCACGTGGTATTATTACGATTCGATCCTGCCTAGCTTCCG
CGAACTGGCCCTGCTGTTTGAGCATGTGCAGAGAGCCAGAAACGGCGGCCTCAGACCTCTGGAA
GTTCGGAGAGCACCTGTGCCTGATGGCGCCCCTTCTAGATATCCTCCAGTGGCCACCTGTCACA
GACCCGGCAGCACATCTTTTTGCCCTGGCGAGTCTAGCCGGATGGGCATCAAGGACAGAATCAG
AATGGGCAGCAGCCAGCGGAGAACAGGCCCTTCTAAACAGCATCTGGCCCCTCCAACCATGCCT
ACAAGCCCTAGCTCTGAGCAAGTGGGCGAAGCCACCTCTCCTACCAAGGTGCAGAAGTCCTGGT
CCTTCAACGACCGGACCAGATTTAGAGCCAGCCTCCGGCTGAAGCCCAGAACCTCTGCCGAGGA
TGCCCCTTCTGAAGAGGTGGCCGAAGAGAAGTCCTACCAGTGCGAGCTGACCGTGGACGACATC
ATGCCAGCCGTGAAAACCGTGATAAGGTCTATACGCATCCTGAAGTTCCTGGTGGCCAAGCGGA
AGTTCAAAGAGACACTGCGGCCCTACGACGTGAAGGACGTGATCGAGCAGTATTCTGCCGGCCA
CCTGGACATGCTGGGCAGAATCAAGAGCCTGCAGACCAGAGTGGACCAGATCGTTGGAAGAGGC
CCAGGCGACAGAAAGGCCAGAGAGAAGGGCGATAAGGGCCCATCTGATGCCGAGGTTGTCGACG
AGATATCAATGATGGGCAGAGTCGTGAAAGTCGAAAAACAGGTGCAGAGCATCGAGCACAAGCT
GGACCTGCTGCTGGGATTCTACAGCCGGTGTCTGAGAAGCGGCACATCTGCATCTCTGGGCGCT
GTGCAGGTCCCACTGTTCGATCCTGATATTACGAGCGATTATCACAGCCCCGTGGACCACGAGG
ACATCTCCGTTTCTGCTCAGACCCTGAGCATCAGCAGATCCGTGTCCACCAACATGGACTAAcc
tgcaggcgccggcgGAGCAGGAGGACCAAGGCCCTGGCGAAGGCCGTGGCCTCGATGCTGTCAT
AGTAATACCAGTGTGCAGGTCCCAATGGCTGGTATTAATGTGACAGTCTCGGGGACGCGGGCCT
GGACGCCGGCATCCGGGCTCAGGACCCCCCTCGAGCTCGCTGATCAGCCTCGACTGTGCCTTCT
AGTTGCCAGCCATCTGTTGTTTGCCCCTCCCCCGTGCCTTCCTTGACCCTGGAAGGTGCCACTC
CCACTGTCCTTTCCTAATAAAATGAGGAAATTGCATCGCATTGTCTGAGTAGGTGTCATTCTAT
TCTGGGGGGTGGGGTGGGGCAGGACAGCAAGGGGGAGGATTGGGAAGACAATAGCAGGCATGCT
GGGGATGCGGTGGGCTCTATGGAAGCTTGAATTCAGCTGACGTGCCTCGGACCGCTAGGAACCC
CTAGTGATGGAGTTGGCCACTCCCTCTCTGCGCGCTCGCTCGCTCACTGAGGCCGGGCGACCAA
AGGTCGCCCGACGCCCGGGCTTTGCCCGGGCGGCCTCAGTGAGCGAGCGAGCGCGCAG
Exemplary pITR.CAG.mmu.miR2i_miR6u-26_EGFP
(SEQ ID NO: 247)
CTGCGCGCTCGCTCGCTCACTGAGGCCGCCCGGGCGTCGGGCGACCTTTGGTCGCCCGGCCTCA
GTGAGCGAGCGAGCGCGCAGAGAGGGAGTGGCCAACTCCATCACTAGGGGTTCCTGCGGCCGCA
CGCGTGACATTGATTATTGACTAGTTATTAATAGTAATCAATTACGGGGTCATTAGTTCATAGC
CCATATATGGAGTTCCGCGTTACATAACTTACGGTAAATGGCCCGCCTGGCTGACCGCCCAACG
ACCCCCGCCCATTGACGTCAATAATGACGTATGTTCCCATAGTAACGCCAATAGGGACTTTCCA
TTGACGTCAATGGGTGGACTATTTACGGTAAACTGCCCACTTGGCAGTACATCAAGTGTATCAT
ATGCCAAGTACGCCCCCTATTGACGTCAATGACGGTAAATGGCCCGCCTGGCATTATGCCCAGT
ACATGACCTTATGGGACTTTCCTACTTGGCAGTACATCTACGTATTAGTCATCGCTATTACCAT
GGGTCGAGGTGAGCCCCACGTTCTGCTTCACTCTCCCCATCTCCCCCCCCTCCCCACCCCCAAT
TTTGTATTTATTTATTTTTTAATTATTTTGTGCAGCGATGGGGGCGGGGGGGGGGGGGGCGCGC
GCCAGGCGGGGCGGGGCGGGGCGAGGGGCGGGGCGGGGCGAGGCGGAGAGGTGCGGCGGCAGCC
AATCAGAGCGGCGCGCTCCGAAAGTTTCCTTTTATGGCGAGGCGGCGGCGGCGGCGGCCCTATA
AAAAGCGAAGCGCGCGGCGGGCGGGAGTCGCTGCGTTGCCTTCGCCCCGTGCCCCGCTCCGCGC
CGCCTCGCGCCGCCCGCCCCGGCTCTGACTGACCGCGTTACTCCCACAGGTGAGCGGGCGGGAC
GGCCCTTCTCCTCCGGGCTGTAATTAGCGCTTGGTTTAATGACGGCTCGTTTCTTTTCTGTGGC
TGCGTGAAAGCCTTAAAGGGCTCCGGGAGGGCCCTTTGTGCGGGGGGGAGCGGCTCGGGGGGTG
CGTGCGTGTGTGTGTGCGTGGGGAGCGCCGCGTGCGGCCCGCGCTGCCCGGCGGCTGTGAGCGC
TGCGGGCGCGGCGCGGGGCTTTGTGCGCTCCGCGTGTGCGCGAGGGGAGCGCGGCCGGGGGCGG
TGCCCCGCGGTGCGGGGGGGCTGCGAGGGGAACAAAGGCTGCGTGCGGGGTGTGTGCGTGGGGG
GGTGAGCAGGGGGTGTGGGCGCGGCGGTCGGGCTGTAACCCCCCCCTGCACCCCCCTCCCCGAG
TTGCTGAGCACGGCCCGGCTTCGGGTGCGGGGCTCCGTGCGGGGCGTGGCGCGGGGCTCGCCGT
GCCGGGCGGGGGGTGGCGGCAGGTGGGGGTGCCGGGCGGGGCGGGGCCGCCTCGGGCCGGGGAG
GGCTCGGGGGAGGGGCGCGGCGGCCCCCGGAGCGCCGGCGGAGCAGGAGGACCAAGGCCCTGGC
GAAGGCCGTGGCCTCGTTGAGTCTTAGAGAGGCCCGGTGTGCAGGTCCCAATGGCCGGGTCTTA
CTGAGATTCCACGGGGACGCGGGCCTGGACGCCGGCATCCGGGCTCAGGACCCCCCTCTCTAGA
GCCTCTGCTAACCATGTTCATGCCTTCTTCTTTTTCCTACAGCTCCTGGGCAACGTGCTGGTTA
TTGTGACCGGTCGCTAGCCACCATGGTGAGCAAGGGCGAGGAGCTGTTCACCGGGGTGGTGCCC
ATCCTGGTCGAGCTGGACGGCGACGTAAACGGCCACAAGTTCAGCGTGTCCGGCGAGGGCGAGG
GCGATGCCACCTACGGCAAGCTGACCCTGAAGTTCATCTGCACCACCGGCAAGCTGCCCGTGCC
CTGGCCCACCCTCGTGACCACCCTGACCTACGGCGTGCAGTGCTTCAGCCGCTACCCCGACCAC
ATGAAGCAGCACGACTTCTTCAAGTCCGCCATGCCCGAAGGCTACGTCCAGGAGCGCACCATCT
TCTTCAAGGACGACGGCAACTACAAGACCCGCGCCGAGGTGAAGTTCGAGGGCGACACCCTGGT
GAACCGCATCGAGCTGAAGGGCATCGACTTCAAGGAGGACGGCAACATCCTGGGGCACAAGCTG
GAGTACAACTACAACAGCCACAACGTCTATATCATGGCCGACAAGCAGAAGAACGGCATCAAGG
TGAACTTCAAGATCCGCCACAACATCGAGGACGGCAGCGTGCAGCTCGCCGACCACTACCAGCA
GAACACCCCCATCGGCGACGGCCCCGTGCTGCTGCCCGACAACCACTACCTGAGCACCCAGTCC
GCCCTGAGCAAAGACCCCAACGAGAAGCGCGATCACATGGTCCTGCTGGAGTTCGTGACCGCCG
CCGGGATCACTCTCGGCATGGACGAGCTGTACAAGTAAcctgcaggcgccggcgGAGCAGGAGG
ACCAAGGCCCTGGCGAAGGCCGTGGCCTCGATGCTGTCATAGTAATACCAGTGTGCAGGTCCCA
ATGGCTGGTATTAATGTGACAGTCTCGGGGACGCGGGCCTGGACGCCGGCATCCGGGCTCAGGA
CCCCCCTCGAGCTCGCTGATCAGCCTCGACTGTGCCTTCTAGTTGCCAGCCATCTGTTGTTTGC
CCCTCCCCCGTGCCTTCCTTGACCCTGGAAGGTGCCACTCCCACTGTCCTTTCCTAATAAAATG
AGGAAATTGCATCGCATTGTCTGAGTAGGTGTCATTCTATTCTGGGGGGTGGGGTGGGGCAGGA
CAGCAAGGGGGAGGATTGGGAAGACAATAGCAGGCATGCTGGGGATGCGGTGGGCTCTATGGAA
GCTTGAATTCAGCTGACGTGCCTCGGACCGCTAGGAACCCCTAGTGATGGAGTTGGCCACTCCC
TCTCTGCGCGCTCGCTCGCTCACTGAGGCCGGGCGACCAAAGGTCGCCCGACGCCCGGGCTTTG
CCCGGGCGGCCTCAGTGAGCGAGCGAGCGCGCAG
Exemplary pITR.CAG.mmu.miR2i_miR6u-26_KCNQ4codop
(SEQ ID NO: 248)
CTGCGCGCTCGCTCGCTCACTGAGGCCGCCCGGGCGTCGGGCGACCTTTGGTCGCCCGGCCTCA
GTGAGCGAGCGAGCGCGCAGAGAGGGAGTGGCCAACTCCATCACTAGGGGTTCCTGCGGCCGCA
CGCGTGACATTGATTATTGACTAGTTATTAATAGTAATCAATTACGGGGTCATTAGTTCATAGC
CCATATATGGAGTTCCGCGTTACATAACTTACGGTAAATGGCCCGCCTGGCTGACCGCCCAACG
ACCCCCGCCCATTGACGTCAATAATGACGTATGTTCCCATAGTAACGCCAATAGGGACTTTCCA
TTGACGTCAATGGGTGGACTATTTACGGTAAACTGCCCACTTGGCAGTACATCAAGTGTATCAT
ATGCCAAGTACGCCCCCTATTGACGTCAATGACGGTAAATGGCCCGCCTGGCATTATGCCCAGT
ACATGACCTTATGGGACTTTCCTACTTGGCAGTACATCTACGTATTAGTCATCGCTATTACCAT
GGGTCGAGGTGAGCCCCACGTTCTGCTTCACTCTCCCCATCTCCCCCCCCTCCCCACCCCCAAT
TTTGTATTTATTTATTTTTTAATTATTTTGTGCAGCGATGGGGGCGGGGGGGGGGGGGGCGCGC
GCCAGGCGGGGCGGGGCGGGGCGAGGGGCGGGGCGGGGCGAGGCGGAGAGGTGCGGCGGCAGCC
AATCAGAGCGGCGCGCTCCGAAAGTTTCCTTTTATGGCGAGGCGGCGGCGGCGGCGGCCCTATA
AAAAGCGAAGCGCGCGGCGGGCGGGAGTCGCTGCGTTGCCTTCGCCCCGTGCCCCGCTCCGCGC
CGCCTCGCGCCGCCCGCCCCGGCTCTGACTGACCGCGTTACTCCCACAGGTGAGCGGGCGGGAC
GGCCCTTCTCCTCCGGGCTGTAATTAGCGCTTGGTTTAATGACGGCTCGTTTCTTTTCTGTGGC
TGCGTGAAAGCCTTAAAGGGCTCCGGGAGGGCCCTTTGTGCGGGGGGGAGCGGCTCGGGGGGTG
CGTGCGTGTGTGTGTGCGTGGGGAGCGCCGCGTGCGGCCCGCGCTGCCCGGCGGCTGTGAGCGC
TGCGGGCGCGGCGCGGGGCTTTGTGCGCTCCGCGTGTGCGCGAGGGGAGCGCGGCCGGGGGCGG
TGCCCCGCGGTGCGGGGGGGCTGCGAGGGGAACAAAGGCTGCGTGCGGGGTGTGTGCGTGGGGG
GGTGAGCAGGGGGTGTGGGCGCGGCGGTCGGGCTGTAACCCCCCCCTGCACCCCCCTCCCCGAG
TTGCTGAGCACGGCCCGGCTTCGGGTGCGGGGCTCCGTGCGGGGCGTGGCGCGGGGCTCGCCGT
GCCGGGCGGGGGGTGGCGGCAGGTGGGGGTGCCGGGCGGGGCGGGGCCGCCTCGGGCCGGGGAG
GGCTCGGGGGAGGGGCGCGGCGGCCCCCGGAGCGCCGGCGGAGCAGGAGGACCAAGGCCCTGGC
GAAGGCCGTGGCCTCGTTGAGTCTTAGAGAGGCCCGGTGTGCAGGTCCCAATGGCCGGGTCTTA
CTGAGATTCCACGGGGACGCGGGCCTGGACGCCGGCATCCGGGCTCAGGACCCCCCTCTCTAGA
GCCTCTGCTAACCATGTTCATGCCTTCTTCTTTTTCCTACAGCTCCTGGGCAACGTGCTGGTTA
TTGTGACCGGTCGCTAGCCACCATGGCTGAAGCCCCTCCTAGAAGGCTTGGACTGGGACCTCCT
CCTGGGGATGCTCCTAGAGCTGAACTGGTGGCTCTGACAGCCGTGCAGTCTGAACAAGGCGAAG
CTGGTGGCGGCGGATCTCCACGTAGACTTGGACTGCTGGGAAGCCCTCTTCCTCCTGGTGCTCC
ACTTCCTGGACCTGGCAGTGGATCTGGATCTGCCTGTGGCCAGAGAAGCTCTGCCGCTCACAAG
AGATACCGGCGGCTGCAGAACTGGGTGTACAACGTGCTGGAAAGACCCAGAGGCTGGGCCTTCG
TGTACCACGTGTTCATCTTTCTGCTGGTGTTCAGCTGCCTGGTGCTGTCCGTGCTGAGCACCAT
CCAAGAACATCAAGAGCTGGCTAACGAGTGCCTGTTAATACTGGAGTTTGTGATGATTGTGGTG
TTCGGCCTCGAGTACATCGTCCGCGTTTGGAGCGCCGGCTGCTGCTGCAGATATAGAGGTTGGC
AAGGCAGATTCCGCTTCGCCAGAAAGCCCTTCTGCGTGATCGACTTCATCGTGTTCGTGGCCAG
CGTGGCCGTGATTGCTGCTGGCACACAGGGCAACATCTTCGCCACAAGCGCCCTGCGGAGCATG
CGGTTTCTGCAGATCCTGAGAATGGTCCGAATGGACAGAAGAGGCGGCACCTGGAAGCTGCTGG
GCTCTGTGGTGTACGCCCACAGCAAAGAGCTGATCACCGCCTGGTACATCGGATTTCTGGTGCT
GATCTTCGCCTCCTTCCTGGTGTACCTGGCCGAGAAGGACGCCAACAGCGACTTTAGCAGCTAC
GCCGACTCTCTTTGGTGGGGCACCATCACACTGACCACCATCGGCTACGGCGACAAGACCCCTC
ACACATGGCTGGGAAGAGTGCTGGCCGCTGGATTTGCTCTGCTGGGCATCAGCTTTTTCGCCCT
GCCTGCCGGAATCCTCGGATCTGGCTTTGCCCTGAAGGTGCAAGAGCAGCATAGACAAAAGCAT
TTTGAAAAGAGAAGAATGCCTGCCGCCAACCTGATTCAGGCCGCTTGGAGACTGTACAGCACCG
ACATGAGCAGAGCCTACCTGACCGCCACGTGGTATTATTACGATTCGATCCTGCCTAGCTTCCG
CGAACTGGCCCTGCTGTTTGAGCATGTGCAGAGAGCCAGAAACGGCGGCCTCAGACCTCTGGAA
GTTCGGAGAGCACCTGTGCCTGATGGCGCCCCTTCTAGATATCCTCCAGTGGCCACCTGTCACA
GACCCGGCAGCACATCTTTTTGCCCTGGCGAGTCTAGCCGGATGGGCATCAAGGACAGAATCAG
AATGGGCAGCAGCCAGCGGAGAACAGGCCCTTCTAAACAGCATCTGGCCCCTCCAACCATGCCT
ACAAGCCCTAGCTCTGAGCAAGTGGGCGAAGCCACCTCTCCTACCAAGGTGCAGAAGTCCTGGT
CCTTCAACGACCGGACCAGATTTAGAGCCAGCCTCCGGCTGAAGCCCAGAACCTCTGCCGAGGA
TGCCCCTTCTGAAGAGGTGGCCGAAGAGAAGTCCTACCAGTGCGAGCTGACCGTGGACGACATC
ATGCCAGCCGTGAAAACCGTGATAAGGTCTATACGCATCCTGAAGTTCCTGGTGGCCAAGCGGA
AGTTCAAAGAGACACTGCGGCCCTACGACGTGAAGGACGTGATCGAGCAGTATTCTGCCGGCCA
CCTGGACATGCTGGGCAGAATCAAGAGCCTGCAGACCAGAGTGGACCAGATCGTTGGAAGAGGC
CCAGGCGACAGAAAGGCCAGAGAGAAGGGCGATAAGGGCCCATCTGATGCCGAGGTTGTCGACG
AGATATCAATGATGGGCAGAGTCGTGAAAGTCGAAAAACAGGTGCAGAGCATCGAGCACAAGCT
GGACCTGCTGCTGGGATTCTACAGCCGGTGTCTGAGAAGCGGCACATCTGCATCTCTGGGCGCT
GTGCAGGTCCCACTGTTCGATCCTGATATTACGAGCGATTATCACAGCCCCGTGGACCACGAGG
ACATCTCCGTTTCTGCTCAGACCCTGAGCATCAGCAGATCCGTGTCCACCAACATGGACTAAcc
tgcaggcgccggcgGAGCAGGAGGACCAAGGCCCTGGCGAAGGCCGTGGCCTCGATGCTGTCAT
AGTAATACCAGTGTGCAGGTCCCAATGGCTGGTATTAATGTGACAGTCTCGGGGACGCGGGCCT
GGACGCCGGCATCCGGGCTCAGGACCCCCCTCGAGCTCGCTGATCAGCCTCGACTGTGCCTTCT
AGTTGCCAGCCATCTGTTGTTTGCCCCTCCCCCGTGCCTTCCTTGACCCTGGAAGGTGCCACTC
CCACTGTCCTTTCCTAATAAAATGAGGAAATTGCATCGCATTGTCTGAGTAGGTGTCATTCTAT
TCTGGGGGGTGGGGTGGGGCAGGACAGCAAGGGGGAGGATTGGGAAGACAATAGCAGGCATGCT
GGGGATGCGGTGGGCTCTATGGAAGCTTGAATTCAGCTGACGTGCCTCGGACCGCTAGGAACCC
CTAGTGATGGAGTTGGCCACTCCCTCTCTGCGCGCTCGCTCGCTCACTGAGGCCGGGCGACCAA
AGGTCGCCCGACGCCCGGGCTTTGCCCGGGCGGCCTCAGTGAGCGAGCGAGCGCGCAG
Exemplary pITR.CAG.mmu.miR5i_miR6u-26_EGFP
(SEQ ID NO: 249)
CTGCGCGCTCGCTCGCTCACTGAGGCCGCCCGGGCGTCGGGCGACCTTTGGTCGCCCGGCCTCA
GTGAGCGAGCGAGCGCGCAGAGAGGGAGTGGCCAACTCCATCACTAGGGGTTCCTGCGGCCGCA
CGCGTGACATTGATTATTGACTAGTTATTAATAGTAATCAATTACGGGGTCATTAGTTCATAGC
CCATATATGGAGTTCCGCGTTACATAACTTACGGTAAATGGCCCGCCTGGCTGACCGCCCAACG
ACCCCCGCCCATTGACGTCAATAATGACGTATGTTCCCATAGTAACGCCAATAGGGACTTTCCA
TTGACGTCAATGGGTGGACTATTTACGGTAAACTGCCCACTTGGCAGTACATCAAGTGTATCAT
ATGCCAAGTACGCCCCCTATTGACGTCAATGACGGTAAATGGCCCGCCTGGCATTATGCCCAGT
ACATGACCTTATGGGACTTTCCTACTTGGCAGTACATCTACGTATTAGTCATCGCTATTACCAT
GGGTCGAGGTGAGCCCCACGTTCTGCTTCACTCTCCCCATCTCCCCCCCCTCCCCACCCCCAAT
TTTGTATTTATTTATTTTTTAATTATTTTGTGCAGCGATGGGGGCGGGGGGGGGGGGGGCGCGC
GCCAGGCGGGGCGGGGCGGGGCGAGGGGCGGGGCGGGGCGAGGCGGAGAGGTGCGGCGGCAGCC
AATCAGAGCGGCGCGCTCCGAAAGTTTCCTTTTATGGCGAGGCGGCGGCGGCGGCGGCCCTATA
AAAAGCGAAGCGCGCGGCGGGCGGGAGTCGCTGCGTTGCCTTCGCCCCGTGCCCCGCTCCGCGC
CGCCTCGCGCCGCCCGCCCCGGCTCTGACTGACCGCGTTACTCCCACAGGTGAGCGGGCGGGAC
GGCCCTTCTCCTCCGGGCTGTAATTAGCGCTTGGTTTAATGACGGCTCGTTTCTTTTCTGTGGC
TGCGTGAAAGCCTTAAAGGGCTCCGGGAGGGCCCTTTGTGCGGGGGGGAGCGGCTCGGGGGGTG
CGTGCGTGTGTGTGTGCGTGGGGAGCGCCGCGTGCGGCCCGCGCTGCCCGGCGGCTGTGAGCGC
TGCGGGCGCGGCGCGGGGCTTTGTGCGCTCCGCGTGTGCGCGAGGGGAGCGCGGCCGGGGGCGG
TGCCCCGCGGTGCGGGGGGGCTGCGAGGGGAACAAAGGCTGCGTGCGGGGTGTGTGCGTGGGGG
GGTGAGCAGGGGGTGTGGGCGCGGCGGTCGGGCTGTAACCCCCCCCTGCACCCCCCTCCCCGAG
TTGCTGAGCACGGCCCGGCTTCGGGTGCGGGGCTCCGTGCGGGGCGTGGCGCGGGGCTCGCCGT
GCCGGGCGGGGGGTGGCGGCAGGTGGGGGTGCCGGGCGGGGCGGGGCCGCCTCGGGCCGGGGAG
GGCTCGGGGGAGGGGCGCGGCGGCCCCCGGAGCGCCGGCGGAGCAGGAGGACCAAGGCCCTGGC
GAAGGCCGTGGCCTCGTTTTCCACCTTGACTACGCGCTGTGCAGGTCCCAATGGGCGTGTAGTA
GAGGTGGAGCACGGGGACGCGGGCCTGGACGCCGGCATCCGGGCTCAGGACCCCCCTCTCTAGA
GCCTCTGCTAACCATGTTCATGCCTTCTTCTTTTTCCTACAGCTCCTGGGCAACGTGCTGGTTA
TTGTGACCGGTCGCTAGCCACCATGGTGAGCAAGGGCGAGGAGCTGTTCACCGGGGTGGTGCCC
ATCCTGGTCGAGCTGGACGGCGACGTAAACGGCCACAAGTTCAGCGTGTCCGGCGAGGGCGAGG
GCGATGCCACCTACGGCAAGCTGACCCTGAAGTTCATCTGCACCACCGGCAAGCTGCCCGTGCC
CTGGCCCACCCTCGTGACCACCCTGACCTACGGCGTGCAGTGCTTCAGCCGCTACCCCGACCAC
ATGAAGCAGCACGACTTCTTCAAGTCCGCCATGCCCGAAGGCTACGTCCAGGAGCGCACCATCT
TCTTCAAGGACGACGGCAACTACAAGACCCGCGCCGAGGTGAAGTTCGAGGGCGACACCCTGGT
GAACCGCATCGAGCTGAAGGGCATCGACTTCAAGGAGGACGGCAACATCCTGGGGCACAAGCTG
GAGTACAACTACAACAGCCACAACGTCTATATCATGGCCGACAAGCAGAAGAACGGCATCAAGG
TGAACTTCAAGATCCGCCACAACATCGAGGACGGCAGCGTGCAGCTCGCCGACCACTACCAGCA
GAACACCCCCATCGGCGACGGCCCCGTGCTGCTGCCCGACAACCACTACCTGAGCACCCAGTCC
GCCCTGAGCAAAGACCCCAACGAGAAGCGCGATCACATGGTCCTGCTGGAGTTCGTGACCGCCG
CCGGGATCACTCTCGGCATGGACGAGCTGTACAAGTAAcctgcaggcgccggcgGAGCAGGAGG
ACCAAGGCCCTGGCGAAGGCCGTGGCCTCGATGCTGTCATAGTAATACCAGTGTGCAGGTCCCA
ATGGCTGGTATTAATGTGACAGTCTCGGGGACGCGGGCCTGGACGCCGGCATCCGGGCTCAGGA
CCCCCCTCGAGCTCGCTGATCAGCCTCGACTGTGCCTTCTAGTTGCCAGCCATCTGTTGTTTGC
CCCTCCCCCGTGCCTTCCTTGACCCTGGAAGGTGCCACTCCCACTGTCCTTTCCTAATAAAATG
AGGAAATTGCATCGCATTGTCTGAGTAGGTGTCATTCTATTCTGGGGGGTGGGGTGGGGCAGGA
CAGCAAGGGGGAGGATTGGGAAGACAATAGCAGGCATGCTGGGGATGCGGTGGGCTCTATGGAA
GCTTGAATTCAGCTGACGTGCCTCGGACCGCTAGGAACCCCTAGTGATGGAGTTGGCCACTCCC
TCTCTGCGCGCTCGCTCGCTCACTGAGGCCGGGCGACCAAAGGTCGCCCGACGCCCGGGCTTTG
CCCGGGCGGCCTCAGTGAGCGAGCGAGCGCGCAG
Exemplary pITR.CAG.mmu.miR5i_miR6u-26_KCNQ4codop
(SEQ ID NO: 250)
CTGCGCGCTCGCTCGCTCACTGAGGCCGCCCGGGCGTCGGGCGACCTTTGGTCGCCCGGCCTCA
GTGAGCGAGCGAGCGCGCAGAGAGGGAGTGGCCAACTCCATCACTAGGGGTTCCTGCGGCCGCA
CGCGTGACATTGATTATTGACTAGTTATTAATAGTAATCAATTACGGGGTCATTAGTTCATAGC
CCATATATGGAGTTCCGCGTTACATAACTTACGGTAAATGGCCCGCCTGGCTGACCGCCCAACG
ACCCCCGCCCATTGACGTCAATAATGACGTATGTTCCCATAGTAACGCCAATAGGGACTTTCCA
TTGACGTCAATGGGTGGACTATTTACGGTAAACTGCCCACTTGGCAGTACATCAAGTGTATCAT
ATGCCAAGTACGCCCCCTATTGACGTCAATGACGGTAAATGGCCCGCCTGGCATTATGCCCAGT
ACATGACCTTATGGGACTTTCCTACTTGGCAGTACATCTACGTATTAGTCATCGCTATTACCAT
GGGTCGAGGTGAGCCCCACGTTCTGCTTCACTCTCCCCATCTCCCCCCCCTCCCCACCCCCAAT
TTTGTATTTATTTATTTTTTAATTATTTTGTGCAGCGATGGGGGCGGGGGGGGGGGGGGCGCGC
GCCAGGCGGGGCGGGGCGGGGCGAGGGGCGGGGCGGGGCGAGGCGGAGAGGTGCGGCGGCAGCC
AATCAGAGCGGCGCGCTCCGAAAGTTTCCTTTTATGGCGAGGCGGCGGCGGCGGCGGCCCTATA
AAAAGCGAAGCGCGCGGCGGGCGGGAGTCGCTGCGTTGCCTTCGCCCCGTGCCCCGCTCCGCGC
CGCCTCGCGCCGCCCGCCCCGGCTCTGACTGACCGCGTTACTCCCACAGGTGAGCGGGCGGGAC
GGCCCTTCTCCTCCGGGCTGTAATTAGCGCTTGGTTTAATGACGGCTCGTTTCTTTTCTGTGGC
TGCGTGAAAGCCTTAAAGGGCTCCGGGAGGGCCCTTTGTGCGGGGGGGAGCGGCTCGGGGGGTG
CGTGCGTGTGTGTGTGCGTGGGGAGCGCCGCGTGCGGCCCGCGCTGCCCGGCGGCTGTGAGCGC
TGCGGGCGCGGCGCGGGGCTTTGTGCGCTCCGCGTGTGCGCGAGGGGAGCGCGGCCGGGGGCGG
TGCCCCGCGGTGCGGGGGGGCTGCGAGGGGAACAAAGGCTGCGTGCGGGGTGTGTGCGTGGGGG
GGTGAGCAGGGGGTGTGGGCGCGGCGGTCGGGCTGTAACCCCCCCCTGCACCCCCCTCCCCGAG
TTGCTGAGCACGGCCCGGCTTCGGGTGCGGGGCTCCGTGCGGGGCGTGGCGCGGGGCTCGCCGT
GCCGGGCGGGGGGTGGCGGCAGGTGGGGGTGCCGGGCGGGGCGGGGCCGCCTCGGGCCGGGGAG
GGCTCGGGGGAGGGGCGCGGCGGCCCCCGGAGCGCCGGCGGAGCAGGAGGACCAAGGCCCTGGC
GAAGGCCGTGGCCTCGTTTTCCACCTTGACTACGCGCTGTGCAGGTCCCAATGGGCGTGTAGTA
GAGGTGGAGCACGGGGACGCGGGCCTGGACGCCGGCATCCGGGCTCAGGACCCCCCTCTCTAGA
GCCTCTGCTAACCATGTTCATGCCTTCTTCTTTTTCCTACAGCTCCTGGGCAACGTGCTGGTTA
TTGTGACCGGTCGCTAGCCACCATGGCTGAAGCCCCTCCTAGAAGGCTTGGACTGGGACCTCCT
CCTGGGGATGCTCCTAGAGCTGAACTGGTGGCTCTGACAGCCGTGCAGTCTGAACAAGGCGAAG
CTGGTGGCGGCGGATCTCCACGTAGACTTGGACTGCTGGGAAGCCCTCTTCCTCCTGGTGCTCC
ACTTCCTGGACCTGGCAGTGGATCTGGATCTGCCTGTGGCCAGAGAAGCTCTGCCGCTCACAAG
AGATACCGGCGGCTGCAGAACTGGGTGTACAACGTGCTGGAAAGACCCAGAGGCTGGGCCTTCG
TGTACCACGTGTTCATCTTTCTGCTGGTGTTCAGCTGCCTGGTGCTGTCCGTGCTGAGCACCAT
CCAAGAACATCAAGAGCTGGCTAACGAGTGCCTGTTAATACTGGAGTTTGTGATGATTGTGGTG
TTCGGCCTCGAGTACATCGTCCGCGTTTGGAGCGCCGGCTGCTGCTGCAGATATAGAGGTTGGC
AAGGCAGATTCCGCTTCGCCAGAAAGCCCTTCTGCGTGATCGACTTCATCGTGTTCGTGGCCAG
CGTGGCCGTGATTGCTGCTGGCACACAGGGCAACATCTTCGCCACAAGCGCCCTGCGGAGCATG
CGGTTTCTGCAGATCCTGAGAATGGTCCGAATGGACAGAAGAGGCGGCACCTGGAAGCTGCTGG
GCTCTGTGGTGTACGCCCACAGCAAAGAGCTGATCACCGCCTGGTACATCGGATTTCTGGTGCT
GATCTTCGCCTCCTTCCTGGTGTACCTGGCCGAGAAGGACGCCAACAGCGACTTTAGCAGCTAC
GCCGACTCTCTTTGGTGGGGCACCATCACACTGACCACCATCGGCTACGGCGACAAGACCCCTC
ACACATGGCTGGGAAGAGTGCTGGCCGCTGGATTTGCTCTGCTGGGCATCAGCTTTTTCGCCCT
GCCTGCCGGAATCCTCGGATCTGGCTTTGCCCTGAAGGTGCAAGAGCAGCATAGACAAAAGCAT
TTTGAAAAGAGAAGAATGCCTGCCGCCAACCTGATTCAGGCCGCTTGGAGACTGTACAGCACCG
ACATGAGCAGAGCCTACCTGACCGCCACGTGGTATTATTACGATTCGATCCTGCCTAGCTTCCG
CGAACTGGCCCTGCTGTTTGAGCATGTGCAGAGAGCCAGAAACGGCGGCCTCAGACCTCTGGAA
GTTCGGAGAGCACCTGTGCCTGATGGCGCCCCTTCTAGATATCCTCCAGTGGCCACCTGTCACA
GACCCGGCAGCACATCTTTTTGCCCTGGCGAGTCTAGCCGGATGGGCATCAAGGACAGAATCAG
AATGGGCAGCAGCCAGCGGAGAACAGGCCCTTCTAAACAGCATCTGGCCCCTCCAACCATGCCT
ACAAGCCCTAGCTCTGAGCAAGTGGGCGAAGCCACCTCTCCTACCAAGGTGCAGAAGTCCTGGT
CCTTCAACGACCGGACCAGATTTAGAGCCAGCCTCCGGCTGAAGCCCAGAACCTCTGCCGAGGA
TGCCCCTTCTGAAGAGGTGGCCGAAGAGAAGTCCTACCAGTGCGAGCTGACCGTGGACGACATC
ATGCCAGCCGTGAAAACCGTGATAAGGTCTATACGCATCCTGAAGTTCCTGGTGGCCAAGCGGA
AGTTCAAAGAGACACTGCGGCCCTACGACGTGAAGGACGTGATCGAGCAGTATTCTGCCGGCCA
CCTGGACATGCTGGGCAGAATCAAGAGCCTGCAGACCAGAGTGGACCAGATCGTTGGAAGAGGC
CCAGGCGACAGAAAGGCCAGAGAGAAGGGCGATAAGGGCCCATCTGATGCCGAGGTTGTCGACG
AGATATCAATGATGGGCAGAGTCGTGAAAGTCGAAAAACAGGTGCAGAGCATCGAGCACAAGCT
GGACCTGCTGCTGGGATTCTACAGCCGGTGTCTGAGAAGCGGCACATCTGCATCTCTGGGCGCT
GTGCAGGTCCCACTGTTCGATCCTGATATTACGAGCGATTATCACAGCCCCGTGGACCACGAGG
ACATCTCCGTTTCTGCTCAGACCCTGAGCATCAGCAGATCCGTGTCCACCAACATGGACTAAcc
tgcaggcgccggcgGAGCAGGAGGACCAAGGCCCTGGCGAAGGCCGTGGCCTCGATGCTGTCAT
AGTAATACCAGTGTGCAGGTCCCAATGGCTGGTATTAATGTGACAGTCTCGGGGACGCGGGCCT
GGACGCCGGCATCCGGGCTCAGGACCCCCCTCGAGCTCGCTGATCAGCCTCGACTGTGCCTTCT
AGTTGCCAGCCATCTGTTGTTTGCCCCTCCCCCGTGCCTTCCTTGACCCTGGAAGGTGCCACTC
CCACTGTCCTTTCCTAATAAAATGAGGAAATTGCATCGCATTGTCTGAGTAGGTGTCATTCTAT
TCTGGGGGGTGGGGTGGGGCAGGACAGCAAGGGGGAGGATTGGGAAGACAATAGCAGGCATGCT
GGGGATGCGGTGGGCTCTATGGAAGCTTGAATTCAGCTGACGTGCCTCGGACCGCTAGGAACCC
CTAGTGATGGAGTTGGCCACTCCCTCTCTGCGCGCTCGCTCGCTCACTGAGGCCGGGCGACCAA
AGGTCGCCCGACGCCCGGGCTTTGCCCGGGCGGCCTCAGTGAGCGAGCGAGCGCGCAG
Exemplary pITR-CAG.mmu.1xmiR2i_3xmiR6u-26_EGFP
(SEQ ID NO: 251)
CTGCGCGCTCGCTCGCTCACTGAGGCCGCCCGGGCGTCGGGCGACCTTTGGTCGCCCGGCCTCA
GTGAGCGAGCGAGCGCGCAGAGAGGGAGTGGCCAACTCCATCACTAGGGGTTCCTGCGGCCGCA
CGCGTGACATTGATTATTGACTAGTTATTAATAGTAATCAATTACGGGGTCATTAGTTCATAGC
CCATATATGGAGTTCCGCGTTACATAACTTACGGTAAATGGCCCGCCTGGCTGACCGCCCAACG
ACCCCCGCCCATTGACGTCAATAATGACGTATGTTCCCATAGTAACGCCAATAGGGACTTTCCA
TTGACGTCAATGGGTGGACTATTTACGGTAAACTGCCCACTTGGCAGTACATCAAGTGTATCAT
ATGCCAAGTACGCCCCCTATTGACGTCAATGACGGTAAATGGCCCGCCTGGCATTATGCCCAGT
ACATGACCTTATGGGACTTTCCTACTTGGCAGTACATCTACGTATTAGTCATCGCTATTACCAT
GGGTCGAGGTGAGCCCCACGTTCTGCTTCACTCTCCCCATCTCCCCCCCCTCCCCACCCCCAAT
TTTGTATTTATTTATTTTTTAATTATTTTGTGCAGCGATGGGGGCGGGGGGGGGGGGGGCGCGC
GCCAGGCGGGGCGGGGCGGGGCGAGGGGCGGGGCGGGGCGAGGCGGAGAGGTGCGGCGGCAGCC
AATCAGAGCGGCGCGCTCCGAAAGTTTCCTTTTATGGCGAGGCGGCGGCGGCGGCGGCCCTATA
AAAAGCGAAGCGCGCGGCGGGCGGGAGTCGCTGCGTTGCCTTCGCCCCGTGCCCCGCTCCGCGC
CGCCTCGCGCCGCCCGCCCCGGCTCTGACTGACCGCGTTACTCCCACAGGTGAGCGGGCGGGAC
GGCCCTTCTCCTCCGGGCTGTAATTAGCGCTTGGTTTAATGACGGCTCGTTTCTTTTCTGTGGC
TGCGTGAAAGCCTTAAAGGGCTCCGGGAGGGCCCTTTGTGCGGGGGGGAGCGGCTCGGGGGGTG
CGTGCGTGTGTGTGTGCGTGGGGAGCGCCGCGTGCGGCCCGCGCTGCCCGGCGGCTGTGAGCGC
TGCGGGCGCGGCGCGGGGCTTTGTGCGCTCCGCGTGTGCGCGAGGGGAGCGCGGCCGGGGGCGG
TGCCCCGCGGTGCGGGGGGGCTGCGAGGGGAACAAAGGCTGCGTGCGGGGTGTGTGCGTGGGGG
GGTGAGCAGGGGGTGTGGGCGCGGCGGTCGGGCTGTAACCCCCCCCTGCACCCCCCTCCCCGAG
TTGCTGAGCACGGCCCGGCTTCGGGTGCGGGGCTCCGTGCGGGGCGTGGCGCGGGGCTCGCCGT
GCCGGGCGGGGGGTGGCGGCAGGTGGGGGTGCCGGGCGGGGCGGGGCCGCCTCGGGCCGGGGAG
GGCTCGGGGGAGGGGCGCGGCGGCCCCCGGAGCGCCGGCGGAGCAGGAGGACCAAGGCCCTGGC
GAAGGCCGTGGCCTCGTTGAGTCTTAGAGAGGCCCGGTGTGCAGGTCCCAATGGCCGGGTCTTA
CTGAGATTCCACGGGGACGCGGGCCTGGACGCCGGCATCCGGGCTCAGGACCCCCCTCTCTAGA
GCCTCTGCTAACCATGTTCATGCCTTCTTCTTTTTCCTACAGCTCCTGGGCAACGTGCTGGTTA
TTGTGACCGGTCGCTAGCCACCATGGTGAGCAAGGGCGAGGAGCTGTTCACCGGGGTGGTGCCC
ATCCTGGTCGAGCTGGACGGCGACGTAAACGGCCACAAGTTCAGCGTGTCCGGCGAGGGCGAGG
GCGATGCCACCTACGGCAAGCTGACCCTGAAGTTCATCTGCACCACCGGCAAGCTGCCCGTGCC
CTGGCCCACCCTCGTGACCACCCTGACCTACGGCGTGCAGTGCTTCAGCCGCTACCCCGACCAC
ATGAAGCAGCACGACTTCTTCAAGTCCGCCATGCCCGAAGGCTACGTCCAGGAGCGCACCATCT
TCTTCAAGGACGACGGCAACTACAAGACCCGCGCCGAGGTGAAGTTCGAGGGCGACACCCTGGT
GAACCGCATCGAGCTGAAGGGCATCGACTTCAAGGAGGACGGCAACATCCTGGGGCACAAGCTG
GAGTACAACTACAACAGCCACAACGTCTATATCATGGCCGACAAGCAGAAGAACGGCATCAAGG
TGAACTTCAAGATCCGCCACAACATCGAGGACGGCAGCGTGCAGCTCGCCGACCACTACCAGCA
GAACACCCCCATCGGCGACGGCCCCGTGCTGCTGCCCGACAACCACTACCTGAGCACCCAGTCC
GCCCTGAGCAAAGACCCCAACGAGAAGCGCGATCACATGGTCCTGCTGGAGTTCGTGACCGCCG
CCGGGATCACTCTCGGCATGGACGAGCTGTACAAGTAAcctgcaggcgccggcgGAGCAGGAGG
ACCAAGGCCCTGGCGAAGGCCGTGGCCTCGATGCTGTCATAGTAATACCAGTGTGCAGGTCCCA
ATGGCTGGTATTAATGTGACAGTCTCGGGGACGCGCAATTGGGTGGCCTCGATGCTGTCATAGT
AATACCAGTGTGCAGGTCCCAATGGCTGGTATTAATGTGACAGTCTCGGGGACGCGGGCGCGCC
CGTGGCCTCGATGCTGTCATAGTAATACCAGTGTGCAGGTCCCAATGGCTGGTATTAATGTGAC
AGTCTCGGGGACGCGGGCCTGGACGCCGGCATCCGGGCTCAGGACCCCCCTCGAGCTCGCTGAT
CAGCCTCGACTGTGCCTTCTAGTTGCCAGCCATCTGTTGTTTGCCCCTCCCCCGTGCCTTCCTT
GACCCTGGAAGGTGCCACTCCCACTGTCCTTTCCTAATAAAATGAGGAAATTGCATCGCATTGT
CTGAGTAGGTGTCATTCTATTCTGGGGGGTGGGGTGGGGCAGGACAGCAAGGGGGAGGATTGGG
AAGACAATAGCAGGCATGCTGGGGATGCGGTGGGCTCTATGGAAGCTTGAATTCAGCTGACGTG
CCTCGGACCGCTAGGAACCCCTAGTGATGGAGTTGGCCACTCCCTCTCTGCGCGCTCGCTCGCT
CACTGAGGCCGGGCGACCAAAGGTCGCCCGACGCCCGGGCTTTGCCCGGGCGGCCTCAGTGAGC
GAGCGAGCGCGCAGCTGCCTGCAGG
Exemplary pITR-CAG.mmu.3xmiR2i_3xmiR6u-26_EGFP
(SEQ ID NO: 252)
CCTGCAGGCAGCTGCGCGCTCGCTCGCTCACTGAGGCCGCCCGGGCGTCGGGCGACCTTTGGTC
GCCCGGCCTCAGTGAGCGAGCGAGCGCGCAGAGAGGGAGTGGCCAACTCCATCACTAGGGGTTC
CTGCGGCCGCACGCGTGACATTGATTATTGACTAGTTATTAATAGTAATCAATTACGGGGTCAT
TAGTTCATAGCCCATATATGGAGTTCCGCGTTACATAACTTACGGTAAATGGCCCGCCTGGCTG
ACCGCCCAACGACCCCCGCCCATTGACGTCAATAATGACGTATGTTCCCATAGTAACGCCAATA
GGGACTTTCCATTGACGTCAATGGGTGGACTATTTACGGTAAACTGCCCACTTGGCAGTACATC
AAGTGTATCATATGCCAAGTACGCCCCCTATTGACGTCAATGACGGTAAATGGCCCGCCTGGCA
TTATGCCCAGTACATGACCTTATGGGACTTTCCTACTTGGCAGTACATCTACGTATTAGTCATC
GCTATTACCATGGGTCGAGGTGAGCCCCACGTTCTGCTTCACTCTCCCCATCTCCCCCCCCTCC
CCACCCCCAATTTTGTATTTATTTATTTTTTAATTATTTTGTGCAGCGATGGGGGCGGGGGGGG
GGGGGGCGCGCGCCAGGCGGGGCGGGGCGGGGCGAGGGGCGGGGCGGGGCGAGGCGGAGAGGTG
CGGCGGCAGCCAATCAGAGCGGCGCGCTCCGAAAGTTTCCTTTTATGGCGAGGCGGCGGCGGCG
GCGGCCCTATAAAAAGCGAAGCGCGCGGCGGGCGGGAGTCGCTGCGTTGCCTTCGCCCCGTGCC
CCGCTCCGCGCCGCCTCGCGCCGCCCGCCCCGGCTCTGACTGACCGCGTTACTCCCACAGGTGA
GCGGGCGGGACGGCCCTTCTCCTCCGGGCTGTAATTAGCGCTTGGTTTAATGACGGCTCGTTTC
TTTTCTGTGGCTGCGTGAAAGCCTTAAAGGGCTCCGGGAGGGCCCTTTGTGCGGGGGGGAGCGG
CTCGGGGGGTGCGTGCGTGTGTGTGTGCGTGGGGAGCGCCGCGTGCGGCCCGCGCTGCCCGGCG
GCTGTGAGCGCTGCGGGCGCGGCGCGGGGCTTTGTGCGCTCCGCGTGTGCGCGAGGGGAGCGCG
GCCGGGGGCGGTGCCCCGCGGTGCGGGGGGGCTGCGAGGGGAACAAAGGCTGCGTGCGGGGTGT
GTGCGTGGGGGGGTGAGCAGGGGGTGTGGGCGCGGCGGTCGGGCTGTAACCCCCCCCTGCACCC
CCCTCCCCGAGTTGCTGAGCACGGCCCGGCTTCGGGTGCGGGGCTCCGTGCGGGGCGTGGCGCG
GGGCTCGCCGTGCCGGGCGGGGGGTGGCGGCAGGTGGGGGTGCCGGGCGGGGCGGGGCCGCCTC
GGGCCGGGGAGGGCTCGGGGGAGGGGCGCGGCGGCCCCCGGAGCGCCGGCGGAGCAGGAGGACC
AAGGCCCTGGCGAAGGCCGTGGCCTCGTTGAGTCTTAGAGAGGCCCGGTGTGCAGGTCCCAATG
GCCGGGTCTTACTGAGATTCCACGGGGACGCGGGATCCGGTGGCCTCGTTGAGTCTTAGAGAGG
CCCGGTGTGCAGGTCCCAATGGCCGGGTCTTACTGAGATTCCACGGGGACGCGGGTACCCGTGG
CCTCGTTGAGTCTTAGAGAGGCCCGGTGTGCAGGTCCCAATGGCCGGGTCTTACTGAGATTCCA
CGGGGACGCGGGCCTGGACGCCGGCATCCGGGCTCAGGACCCCCCTCTCTAGAGCCTCTGCTAA
CCATGTTCATGCCTTCTTCTTTTTCCTACAGCTCCTGGGCAACGTGCTGGTTATTGTGACCGGT
CGCTAGCCACCATGGTGAGCAAGGGCGAGGAGCTGTTCACCGGGGTGGTGCCCATCCTGGTCGA
GCTGGACGGCGACGTAAACGGCCACAAGTTCAGCGTGTCCGGCGAGGGCGAGGGCGATGCCACC
TACGGCAAGCTGACCCTGAAGTTCATCTGCACCACCGGCAAGCTGCCCGTGCCCTGGCCCACCC
TCGTGACCACCCTGACCTACGGCGTGCAGTGCTTCAGCCGCTACCCCGACCACATGAAGCAGCA
CGACTTCTTCAAGTCCGCCATGCCCGAAGGCTACGTCCAGGAGCGCACCATCTTCTTCAAGGAC
GACGGCAACTACAAGACCCGCGCCGAGGTGAAGTTCGAGGGCGACACCCTGGTGAACCGCATCG
AGCTGAAGGGCATCGACTTCAAGGAGGACGGCAACATCCTGGGGCACAAGCTGGAGTACAACTA
CAACAGCCACAACGTCTATATCATGGCCGACAAGCAGAAGAACGGCATCAAGGTGAACTTCAAG
ATCCGCCACAACATCGAGGACGGCAGCGTGCAGCTCGCCGACCACTACCAGCAGAACACCCCCA
TCGGCGACGGCCCCGTGCTGCTGCCCGACAACCACTACCTGAGCACCCAGTCCGCCCTGAGCAA
AGACCCCAACGAGAAGCGCGATCACATGGTCCTGCTGGAGTTCGTGACCGCCGCCGGGATCACT
CTCGGCATGGACGAGCTGTACAAGTAAcctgcaggcgccggcgGAGCAGGAGGACCAAGGCCCT
GGCGAAGGCCGTGGCCTCGATGCTGTCATAGTAATACCAGTGTGCAGGTCCCAATGGCTGGTAT
TAATGTGACAGTCTCGGGGACGCGCAATTGGGTGGCCTCGATGCTGTCATAGTAATACCAGTGT
GCAGGTCCCAATGGCTGGTATTAATGTGACAGTCTCGGGGACGCGGGCGCGCCCGTGGCCTCGA
TGCTGTCATAGTAATACCAGTGTGCAGGTCCCAATGGCTGGTATTAATGTGACAGTCTCGGGGA
CGCGGGCCTGGACGCCGGCATCCGGGCTCAGGACCCCCCTCGAGCTCGCTGATCAGCCTCGACT
GTGCCTTCTAGTTGCCAGCCATCTGTTGTTTGCCCCTCCCCCGTGCCTTCCTTGACCCTGGAAG
GTGCCACTCCCACTGTCCTTTCCTAATAAAATGAGGAAATTGCATCGCATTGTCTGAGTAGGTG
TCATTCTATTCTGGGGGGTGGGGTGGGGCAGGACAGCAAGGGGGAGGATTGGGAAGACAATAGC
AGGCATGCTGGGGATGCGGTGGGCTCTATGGAAGCTTGAATTCAGCTGACGTGCCTCGGACCGC
TAGGAACCCCTAGTGATGGAGTTGGCCACTCCCTCTCTGCGCGCTCGCTCGCTCACTGAGGCCG
GGCGACCAAAGGTCGCCCGACGCCCGGGCTTTGCCCGGGCGGCCTCAGTGAGCGAGCGAGCGCG
CAGCTGCCTGGAGG
Exemplary pITR-CAG.mmu.1xmiR2i_3xmiR6u-26_KCNQ4codop
(SEQ ID NO: 253)
CTGCGCGCTCGCTCGCTCACTGAGGCCGCCCGGGCGTCGGGCGACCTTTGGTCGCCCGGCCTCA
GTGAGCGAGCGAGCGCGCAGAGAGGGAGTGGCCAACTCCATCACTAGGGGTTCCTGCGGCCGCA
CGCGTGACATTGATTATTGACTAGTTATTAATAGTAATCAATTACGGGGTCATTAGTTCATAGC
CCATATATGGAGTTCCGCGTTACATAACTTACGGTAAATGGCCCGCCTGGCTGACCGCCCAACG
ACCCCCGCCCATTGACGTCAATAATGACGTATGTTCCCATAGTAACGCCAATAGGGACTTTCCA
TTGACGTCAATGGGTGGACTATTTACGGTAAACTGCCCACTTGGCAGTACATCAAGTGTATCAT
ATGCCAAGTACGCCCCCTATTGACGTCAATGACGGTAAATGGCCCGCCTGGCATTATGCCCAGT
ACATGACCTTATGGGACTTTCCTACTTGGCAGTACATCTACGTATTAGTCATCGCTATTACCAT
GGGTCGAGGTGAGCCCCACGTTCTGCTTCACTCTCCCCATCTCCCCCCCCTCCCCACCCCCAAT
TTTGTATTTATTTATTTTTTAATTATTTTGTGCAGCGATGGGGGCGGGGGGGGGGGGGGCGCGC
GCCAGGCGGGGCGGGGCGGGGCGAGGGGCGGGGCGGGGCGAGGCGGAGAGGTGCGGCGGCAGCC
AATCAGAGCGGCGCGCTCCGAAAGTTTCCTTTTATGGCGAGGCGGCGGCGGCGGCGGCCCTATA
AAAAGCGAAGCGCGCGGCGGGCGGGAGTCGCTGCGTTGCCTTCGCCCCGTGCCCCGCTCCGCGC
CGCCTCGCGCCGCCCGCCCCGGCTCTGACTGACCGCGTTACTCCCACAGGTGAGCGGGCGGGAC
GGCCCTTCTCCTCCGGGCTGTAATTAGCGCTTGGTTTAATGACGGCTCGTTTCTTTTCTGTGGC
TGCGTGAAAGCCTTAAAGGGCTCCGGGAGGGCCCTTTGTGCGGGGGGGAGCGGCTCGGGGGGTG
CGTGCGTGTGTGTGTGCGTGGGGAGCGCCGCGTGCGGCCCGCGCTGCCCGGCGGCTGTGAGCGC
TGCGGGCGCGGCGCGGGGCTTTGTGCGCTCCGCGTGTGCGCGAGGGGAGCGCGGCCGGGGGCGG
TGCCCCGCGGTGCGGGGGGGCTGCGAGGGGAACAAAGGCTGCGTGCGGGGTGTGTGCGTGGGGG
GGTGAGCAGGGGGTGTGGGCGCGGCGGTCGGGCTGTAACCCCCCCCTGCACCCCCCTCCCCGAG
TTGCTGAGCACGGCCCGGCTTCGGGTGCGGGGCTCCGTGCGGGGCGTGGCGCGGGGCTCGCCGT
GCCGGGCGGGGGGTGGCGGCAGGTGGGGGTGCCGGGCGGGGCGGGGCCGCCTCGGGCCGGGGAG
GGCTCGGGGGAGGGGCGCGGCGGCCCCCGGAGCGCCGGCGGAGCAGGAGGACCAAGGCCCTGGC
GAAGGCCGTGGCCTCGTTGAGTCTTAGAGAGGCCCGGTGTGCAGGTCCCAATGGCCGGGTCTTA
CTGAGATTCCACGGGGACGCGGGCCTGGACGCCGGCATCCGGGCTCAGGACCCCCCTCTCTAGA
GCCTCTGCTAACCATGTTCATGCCTTCTTCTTTTTCCTACAGCTCCTGGGCAACGTGCTGGTTA
TTGTGACCGGTCGCTAGCCACCATGGCTGAAGCCCCTCCTAGAAGGCTTGGACTGGGACCTCCT
CCTGGGGATGCTCCTAGAGCTGAACTGGTGGCTCTGACAGCCGTGCAGTCTGAACAAGGCGAAG
CTGGTGGCGGCGGATCTCCACGTAGACTTGGACTGCTGGGAAGCCCTCTTCCTCCTGGTGCTCC
ACTTCCTGGACCTGGCAGTGGATCTGGATCTGCCTGTGGCCAGAGAAGCTCTGCCGCTCACAAG
AGATACCGGCGGCTGCAGAACTGGGTGTACAACGTGCTGGAAAGACCCAGAGGCTGGGCCTTCG
TGTACCACGTGTTCATCTTTCTGCTGGTGTTCAGCTGCCTGGTGCTGTCCGTGCTGAGCACCAT
CCAAGAACATCAAGAGCTGGCTAACGAGTGCCTGTTAATACTGGAGTTTGTGATGATTGTGGTG
TTCGGCCTCGAGTACATCGTCCGCGTTTGGAGCGCCGGCTGCTGCTGCAGATATAGAGGTTGGC
AAGGCAGATTCCGCTTCGCCAGAAAGCCCTTCTGCGTGATCGACTTCATCGTGTTCGTGGCCAG
CGTGGCCGTGATTGCTGCTGGCACACAGGGCAACATCTTCGCCACAAGCGCCCTGCGGAGCATG
CGGTTTCTGCAGATCCTGAGAATGGTCCGAATGGACAGAAGAGGCGGCACCTGGAAGCTGCTGG
GCTCTGTGGTGTACGCCCACAGCAAAGAGCTGATCACCGCCTGGTACATCGGATTTCTGGTGCT
GATCTTCGCCTCCTTCCTGGTGTACCTGGCCGAGAAGGACGCCAACAGCGACTTTAGCAGCTAC
GCCGACTCTCTTTGGTGGGGCACCATCACACTGACCACCATCGGCTACGGCGACAAGACCCCTC
ACACATGGCTGGGAAGAGTGCTGGCCGCTGGATTTGCTCTGCTGGGCATCAGCTTTTTCGCCCT
GCCTGCCGGAATCCTCGGATCTGGCTTTGCCCTGAAGGTGCAAGAGCAGCATAGACAAAAGCAT
TTTGAAAAGAGAAGAATGCCTGCCGCCAACCTGATTCAGGCCGCTTGGAGACTGTACAGCACCG
ACATGAGCAGAGCCTACCTGACCGCCACGTGGTATTATTACGATTCGATCCTGCCTAGCTTCCG
CGAACTGGCCCTGCTGTTTGAGCATGTGCAGAGAGCCAGAAACGGCGGCCTCAGACCTCTGGAA
GTTCGGAGAGCACCTGTGCCTGATGGCGCCCCTTCTAGATATCCTCCAGTGGCCACCTGTCACA
GACCCGGCAGCACATCTTTTTGCCCTGGCGAGTCTAGCCGGATGGGCATCAAGGACAGAATCAG
AATGGGCAGCAGCCAGCGGAGAACAGGCCCTTCTAAACAGCATCTGGCCCCTCCAACCATGCCT
ACAAGCCCTAGCTCTGAGCAAGTGGGCGAAGCCACCTCTCCTACCAAGGTGCAGAAGTCCTGGT
CCTTCAACGACCGGACCAGATTTAGAGCCAGCCTCCGGCTGAAGCCCAGAACCTCTGCCGAGGA
TGCCCCTTCTGAAGAGGTGGCCGAAGAGAAGTCCTACCAGTGCGAGCTGACCGTGGACGACATC
ATGCCAGCCGTGAAAACCGTGATAAGGTCTATACGCATCCTGAAGTTCCTGGTGGCCAAGCGGA
AGTTCAAAGAGACACTGCGGCCCTACGACGTGAAGGACGTGATCGAGCAGTATTCTGCCGGCCA
CCTGGACATGCTGGGCAGAATCAAGAGCCTGCAGACCAGAGTGGACCAGATCGTTGGAAGAGGC
CCAGGCGACAGAAAGGCCAGAGAGAAGGGCGATAAGGGCCCATCTGATGCCGAGGTTGTCGACG
AGATATCAATGATGGGCAGAGTCGTGAAAGTCGAAAAACAGGTGCAGAGCATCGAGCACAAGCT
GGACCTGCTGCTGGGATTCTACAGCCGGTGTCTGAGAAGCGGCACATCTGCATCTCTGGGCGCT
GTGCAGGTCCCACTGTTCGATCCTGATATTACGAGCGATTATCACAGCCCCGTGGACCACGAGG
ACATCTCCGTTTCTGCTCAGACCCTGAGCATCAGCAGATCCGTGTCCACCAACATGGACTAAcc
tgcaggcgccggcgGAGCAGGAGGACCAAGGCCCTGGCGAAGGCCGTGGCCTCGATGCTGTCAT
AGTAATACCAGTGTGCAGGTCCCAATGGCTGGTATTAATGTGACAGTCTCGGGGACGCGCAATT
GGGTGGCCTCGATGCTGTCATAGTAATACCAGTGTGCAGGTCCCAATGGCTGGTATTAATGTGA
CAGTCTCGGGGACGCGGGCGCGCCCGTGGCCTCGATGCTGTCATAGTAATACCAGTGTGCAGGT
CCCAATGGCTGGTATTAATGTGACAGTCTCGGGGACGCGGGCCTGGACGCCGGCATCCGGGCTC
AGGACCCCCCTCGAGCTCGCTGATCAGCCTCGACTGTGCCTTCTAGTTGCCAGCCATCTGTTGT
TTGCCCCTCCCCCGTGCCTTCCTTGACCCTGGAAGGTGCCACTCCCACTGTCCTTTCCTAATAA
AATGAGGAAATTGCATCGCATTGTCTGAGTAGGTGTCATTCTATTCTGGGGGGTGGGGTGGGGC
AGGACAGCAAGGGGGAGGATTGGGAAGACAATAGCAGGCATGCTGGGGATGCGGTGGGCTCTAT
GGAAGCTTGAATTCAGCTGACGTGCCTCGGACCGCTAGGAACCCCTAGTGATGGAGTTGGCCAC
TCCCTCTCTGCGCGCTCGCTCGCTCACTGAGGCCGGGCGACCAAAGGTCGCCCGACGCCCGGGC
TTTGCCCGGGCGGCCTCAGTGAGCGAGCGAGCGCGCAGCTGCCTGCAGG
Exemplary pITR-CAG.mmu.3xmiR2i_3xmiR6u-26_KCNQ4codop
(SEQ ID NO: 254)
CCTGCAGGCAGCTGCGCGCTCGCTCGCTCACTGAGGCCGCCCGGGCGTCGGGCGACCTTTGGTC
GCCCGGCCTCAGTGAGCGAGCGAGCGCGCAGAGAGGGAGTGGCCAACTCCATCACTAGGGGTTC
CTGCGGCCGCACGCGTGACATTGATTATTGACTAGTTATTAATAGTAATCAATTACGGGGTCAT
TAGTTCATAGCCCATATATGGAGTTCCGCGTTACATAACTTACGGTAAATGGCCCGCCTGGCTG
ACCGCCCAACGACCCCCGCCCATTGACGTCAATAATGACGTATGTTCCCATAGTAACGCCAATA
GGGACTTTCCATTGACGTCAATGGGTGGACTATTTACGGTAAACTGCCCACTTGGCAGTACATC
AAGTGTATCATATGCCAAGTACGCCCCCTATTGACGTCAATGACGGTAAATGGCCCGCCTGGCA
TTATGCCCAGTACATGACCTTATGGGACTTTCCTACTTGGCAGTACATCTACGTATTAGTCATC
GCTATTACCATGGGTCGAGGTGAGCCCCACGTTCTGCTTCACTCTCCCCATCTCCCCCCCCTCC
CCACCCCCAATTTTGTATTTATTTATTTTTTAATTATTTTGTGCAGCGATGGGGGCGGGGGGGG
GGGGGGCGCGCGCCAGGCGGGGCGGGGCGGGGCGAGGGGCGGGGCGGGGCGAGGCGGAGAGGTG
CGGCGGCAGCCAATCAGAGCGGCGCGCTCCGAAAGTTTCCTTTTATGGCGAGGCGGCGGCGGCG
GCGGCCCTATAAAAAGCGAAGCGCGCGGCGGGCGGGAGTCGCTGCGTTGCCTTCGCCCCGTGCC
CCGCTCCGCGCCGCCTCGCGCCGCCCGCCCCGGCTCTGACTGACCGCGTTACTCCCACAGGTGA
GCGGGCGGGACGGCCCTTCTCCTCCGGGCTGTAATTAGCGCTTGGTTTAATGACGGCTCGTTTC
TTTTCTGTGGCTGCGTGAAAGCCTTAAAGGGCTCCGGGAGGGCCCTTTGTGCGGGGGGGAGCGG
CTCGGGGGGTGCGTGCGTGTGTGTGTGCGTGGGGAGCGCCGCGTGCGGCCCGCGCTGCCCGGCG
GCTGTGAGCGCTGCGGGCGCGGCGCGGGGCTTTGTGCGCTCCGCGTGTGCGCGAGGGGAGCGCG
GCCGGGGGCGGTGCCCCGCGGTGCGGGGGGGCTGCGAGGGGAACAAAGGCTGCGTGCGGGGTGT
GTGCGTGGGGGGGTGAGCAGGGGGTGTGGGCGCGGCGGTCGGGCTGTAACCCCCCCCTGCACCC
CCCTCCCCGAGTTGCTGAGCACGGCCCGGCTTCGGGTGCGGGGCTCCGTGCGGGGCGTGGCGCG
GGGCTCGCCGTGCCGGGCGGGGGGTGGCGGCAGGTGGGGGTGCCGGGCGGGGCGGGGCCGCCTC
GGGCCGGGGAGGGCTCGGGGGAGGGGCGCGGCGGCCCCCGGAGCGCCGGCGGAGCAGGAGGACC
AAGGCCCTGGCGAAGGCCGTGGCCTCGTTGAGTCTTAGAGAGGCCCGGTGTGCAGGTCCCAATG
GCCGGGTCTTACTGAGATTCCACGGGGACGCGGGATCCGGTGGCCTCGTTGAGTCTTAGAGAGG
CCCGGTGTGCAGGTCCCAATGGCCGGGTCTTACTGAGATTCCACGGGGACGCGGGTACCCGTGG
CCTCGTTGAGTCTTAGAGAGGCCCGGTGTGCAGGTCCCAATGGCCGGGTCTTACTGAGATTCCA
CGGGGACGCGGGCCTGGACGCCGGCATCCGGGCTCAGGACCCCCCTCTCTAGAGCCTCTGCTAA
CCATGTTCATGCCTTCTTCTTTTTCCTACAGCTCCTGGGCAACGTGCTGGTTATTGTGACCGGT
CGCTAGCCACCATGGCTGAAGCCCCTCCTAGAAGGCTTGGACTGGGACCTCCTCCTGGGGATGC
TCCTAGAGCTGAACTGGTGGCTCTGACAGCCGTGCAGTCTGAACAAGGCGAAGCTGGTGGCGGC
GGATCTCCACGTAGACTTGGACTGCTGGGAAGCCCTCTTCCTCCTGGTGCTCCACTTCCTGGAC
CTGGCAGTGGATCTGGATCTGCCTGTGGCCAGAGAAGCTCTGCCGCTCACAAGAGATACCGGCG
GCTGCAGAACTGGGTGTACAACGTGCTGGAAAGACCCAGAGGCTGGGCCTTCGTGTACCACGTG
TTCATCTTTCTGCTGGTGTTCAGCTGCCTGGTGCTGTCCGTGCTGAGCACCATCCAAGAACATC
AAGAGCTGGCTAACGAGTGCCTGTTAATACTGGAGTTTGTGATGATTGTGGTGTTCGGCCTCGA
GTACATCGTCCGCGTTTGGAGCGCCGGCTGCTGCTGCAGATATAGAGGTTGGCAAGGCAGATTC
CGCTTCGCCAGAAAGCCCTTCTGCGTGATCGACTTCATCGTGTTCGTGGCCAGCGTGGCCGTGA
TTGCTGCTGGCACACAGGGCAACATCTTCGCCACAAGCGCCCTGCGGAGCATGCGGTTTCTGCA
GATCCTGAGAATGGTCCGAATGGACAGAAGAGGCGGCACCTGGAAGCTGCTGGGCTCTGTGGTG
TACGCCCACAGCAAAGAGCTGATCACCGCCTGGTACATCGGATTTCTGGTGCTGATCTTCGCCT
CCTTCCTGGTGTACCTGGCCGAGAAGGACGCCAACAGCGACTTTAGCAGCTACGCCGACTCTCT
TTGGTGGGGCACCATCACACTGACCACCATCGGCTACGGCGACAAGACCCCTCACACATGGCTG
GGAAGAGTGCTGGCCGCTGGATTTGCTCTGCTGGGCATCAGCTTTTTCGCCCTGCCTGCCGGAA
TCCTCGGATCTGGCTTTGCCCTGAAGGTGCAAGAGCAGCATAGACAAAAGCATTTTGAAAAGAG
AAGAATGCCTGCCGCCAACCTGATTCAGGCCGCTTGGAGACTGTACAGCACCGACATGAGCAGA
GCCTACCTGACCGCCACGTGGTATTATTACGATTCGATCCTGCCTAGCTTCCGCGAACTGGCCC
TGCTGTTTGAGCATGTGCAGAGAGCCAGAAACGGCGGCCTCAGACCTCTGGAAGTTCGGAGAGC
ACCTGTGCCTGATGGCGCCCCTTCTAGATATCCTCCAGTGGCCACCTGTCACAGACCCGGCAGC
ACATCTTTTTGCCCTGGCGAGTCTAGCCGGATGGGCATCAAGGACAGAATCAGAATGGGCAGCA
GCCAGCGGAGAACAGGCCCTTCTAAACAGCATCTGGCCCCTCCAACCATGCCTACAAGCCCTAG
CTCTGAGCAAGTGGGCGAAGCCACCTCTCCTACCAAGGTGCAGAAGTCCTGGTCCTTCAACGAC
CGGACCAGATTTAGAGCCAGCCTCCGGCTGAAGCCCAGAACCTCTGCCGAGGATGCCCCTTCTG
AAGAGGTGGCCGAAGAGAAGTCCTACCAGTGCGAGCTGACCGTGGACGACATCATGCCAGCCGT
GAAAACCGTGATAAGGTCTATACGCATCCTGAAGTTCCTGGTGGCCAAGCGGAAGTTCAAAGAG
ACACTGCGGCCCTACGACGTGAAGGACGTGATCGAGCAGTATTCTGCCGGCCACCTGGACATGC
TGGGCAGAATCAAGAGCCTGCAGACCAGAGTGGACCAGATCGTTGGAAGAGGCCCAGGCGACAG
AAAGGCCAGAGAGAAGGGCGATAAGGGCCCATCTGATGCCGAGGTTGTCGACGAGATATCAATG
ATGGGCAGAGTCGTGAAAGTCGAAAAACAGGTGCAGAGCATCGAGCACAAGCTGGACCTGCTGC
TGGGATTCTACAGCCGGTGTCTGAGAAGCGGCACATCTGCATCTCTGGGCGCTGTGCAGGTCCC
ACTGTTCGATCCTGATATTACGAGCGATTATCACAGCCCCGTGGACCACGAGGACATCTCCGTT
TCTGCTCAGACCCTGAGCATCAGCAGATCCGTGTCCACCAACATGGACTAAcctgcaggcgccg
gcgGAGCAGGAGGACCAAGGCCCTGGCGAAGGCCGTGGCCTCGATGCTGTCATAGTAATACCAG
TGTGCAGGTCCCAATGGCTGGTATTAATGTGACAGTCTCGGGGACGCGCAATTGGGTGGCCTCG
ATGCTGTCATAGTAATACCAGTGTGCAGGTCCCAATGGCTGGTATTAATGTGACAGTCTCGGGG
ACGCGGGCGCGCCCGTGGCCTCGATGCTGTCATAGTAATACCAGTGTGCAGGTCCCAATGGCTG
GTATTAATGTGACAGTCTCGGGGACGCGGGCCTGGACGCCGGCATCCGGGCTCAGGACCCCCCT
CGAGCTCGCTGATCAGCCTCGACTGTGCCTTCTAGTTGCCAGCCATCTGTTGTTTGCCCCTCCC
CCGTGCCTTCCTTGACCCTGGAAGGTGCCACTCCCACTGTCCTTTCCTAATAAAATGAGGAAAT
TGCATCGCATTGTCTGAGTAGGTGTCATTCTATTCTGGGGGGTGGGGTGGGGCAGGACAGCAAG
GGGGAGGATTGGGAAGACAATAGCAGGCATGCTGGGGATGCGGTGGGCTCTATGGAAGCTTGAA
TTCAGCTGACGTGCCTCGGACCGCTAGGAACCCCTAGTGATGGAGTTGGCCACTCCCTCTCTGC
GCGCTCGCTCGCTCACTGAGGCCGGGCGACCAAAGGTCGCCCGACGCCCGGGCTTTGCCCGGGC
GGCCTCAGTGAGCGAGCGAGCGCGCAGCTGCCTGCAGG

[0369] Exemplary hKCNQ4 codon optimized to resist microRNA Construct Sequences

Exemplary pITR-CMV.hKCNQ4codop_v2.mScarlet sequence
(SEQ ID NO: 255)
CCTGCAGGCAGCTGCGCGCTCGCTCGCTCACTGAGGCCGCCCGGGCGTCGGGCGACCTTTGGTC
GCCCGGCCTCAGTGAGCGAGCGAGCGCGCAGAGAGGGAGTGGCCAACTCCATCACTAGGGGTTC
CTGCGGCCGCACGCGTCTAGATCCCATATATGGAGTTCCGCGTTACATAACTTACGGTAAATGG
CCCGCCTGGCTGACCGCCCAACGACCCCCGCCCATTGACGTCAATAATGACGTATGTTCCCATA
GTAACGCCAATAGGGACTTTCCATTGACGTCAATGGGTGGAGTATTTACGGTAAACTGCCCACT
TGGCAGTACATCAAGTGTATCATATGCCAAGTACGCCCCCTATTGACGTCAATGACGGTAAATG
GCCCGCCTGGCATTATGCCCAGTACATGACCTTATGGGACTTTCCTACTTGGCAGTACATCTAC
GTATTAGTCATCGCTATTACCATGGTGATGCGGTTTTGGCAGTACATCAATGGGCGTGGATAGC
GGTTTGACTCACGGGGATTTCCAAGTCTCCACCCCATTGACGTCAATGGGAGTTTGTTTTGGCA
CCAAAATCAACGGGACTTTCCAAAATGTCGTAACAACTCCGCCCCATTGACGCAAATGGGCGGT
AGGCGTGTACGGTGGGAGGTCTATATAAGCAGAGCTCGTTTAGTGAACCGTcagatcgcctgga
gacgcACCGGTGCCACCATGGCTGAAGCCCCTCCTAGAAGGCTTGGACTGGGACCTCCTCCTGG
GGATGCTCCTAGAGCTGAACTGGTGGCTCTGACAGCCGTGCAGTCTGAACAAGGCGAAGCTGGT
GGCGGCGGATCTCCACGTAGACTTGGACTGCTGGGAAGCCCTCTTCCTCCTGGTGCTCCACTTC
CTGGACCTGGCAGTGGATCTGGATCTGCCTGTGGCCAGAGAAGCTCTGCCGCTCACAAGAGATA
CCGGCGGCTGCAGAACTGGGTGTACAACGTGCTGGAAAGACCCAGAGGCTGGGCCTTCGTGTAC
CACGTGTTCATCTTTCTGCTGGTGTTCAGCTGCCTGGTGCTGTCCGTGCTGAGCACCATCCAAG
AACATCAAGAGCTGGCTAACGAGTGCCTGTTAATACTGGAGTTTGTGATGATTGTGGTGTTCGG
CCTCGAGTACATCGTCCGCGTTTGGAGCGCCGGCTGCTGCTGCAGATATAGAGGTTGGCAAGGC
AGATTCCGCTTCGCCAGAAAGCCCTTCTGCGTGATCGACTTCATCGTGTTCGTGGCCAGCGTGG
CCGTGATTGCTGCTGGCACACAGGGCAACATCTTCGCCACAAGCGCCCTGCGGAGCATGCGGTT
TCTGCAGATCCTGAGAATGGTCCGAATGGACAGAAGAGGCGGCACCTGGAAGCTGCTGGGCTCT
GTGGTGTACGCCCACAGCAAAGAGCTGATCACCGCCTGGTACATCGGATTTCTGGTGCTGATCT
TCGCCTCCTTCCTGGTGTACCTGGCCGAGAAGGACGCCAACAGCGACTTTAGCAGCTACGCCGA
CTCTCTTTGGTGGGGCACCATCACACTGACCACCATCGGCTACGGCGACAAGACCCCTCACACA
TGGCTGGGAAGAGTGCTGGCCGCTGGATTTGCTCTGCTGGGCATCAGCTTTTTCGCCCTGCCTG
CCGGAATCCTCGGATCTGGCTTTGCCCTGAAGGTGCAAGAGCAGCATAGACAAAAGCATTTTGA
AAAGAGAAGAATGCCTGCCGCCAACCTGATTCAGGCCGCTTGGAGACTGTACAGCACCGACATG
AGCAGAGCCTACCTGACCGCCACGTGGTATTATTACGATTCGATCCTGCCTAGCTTCCGCGAAC
TGGCCCTGCTGTTTGAGCATGTGCAGAGAGCCAGAAACGGCGGCCTCAGACCTCTGGAAGTTCG
GAGAGCACCTGTGCCTGATGGCGCCCCTTCTAGATATCCTCCAGTGGCCACCTGTCACAGACCC
GGCAGCACATCTTTTTGCCCTGGCGAGTCTAGCCGGATGGGCATCAAGGACAGAATCAGAATGG
GCAGCAGCCAGCGGAGAACAGGCCCTTCTAAACAGCATCTGGCCCCTCCAACCATGCCTACAAG
CCCTAGCTCTGAGCAAGTGGGCGAAGCCACCTCTCCTACCAAGGTGCAGAAGTCCTGGTCCTTC
AACGACCGGACCAGATTTAGAGCCAGCCTCCGGCTGAAGCCCAGAACCTCTGCCGAGGATGCCC
CTTCTGAAGAGGTGGCCGAAGAGAAGTCCTACCAGTGCGAGCTGACCGTGGACGACATCATGCC
AGCCGTGAAAACCGTGATAAGGTCTATACGCATCCTGAAGTTCCTGGTGGCCAAGCGGAAGTTC
AAAGAGACACTGCGGCCCTACGACGTGAAGGACGTGATCGAGCAGTATTCTGCCGGCCACCTGG
ACATGCTGGGCAGAATCAAGAGCCTGCAGACCAGAGTGGACCAGATCGTTGGAAGAGGCCCAGG
CGACAGAAAGGCCAGAGAGAAGGGCGATAAGGGCCCATCTGATGCCGAGGTTGTCGACGAGATA
TCAATGATGGGCAGAGTCGTGAAAGTCGAAAAACAGGTGCAGAGCATCGAGCACAAGCTGGACC
TGCTGCTGGGATTCTACAGCCGGTGTCTGAGAAGCGGCACATCTGCATCTCTGGGCGCTGTGCA
GGTCCCACTGTTCGATCCTGATATTACGAGCGATTATCACAGCCCCGTGGACCACGAGGACATC
TCCGTTTCTGCTCAGACCCTGAGCATCAGCAGATCCGTGTCCACCAACATGGACGGATCCCGGG
CTGACTACAAAGACCATGACGGTGATTATAAAGATCATGACATCGACTACAAGGATGACGATGA
CAAGGGCTCCGGAGAGGGCAGAGGAAGTCTGCTAACATGCGGTGACGTCGAGGAGAATCCTGGC
CCAATGGTGAGCAAGGGCGAGGCAGTGATCAAGGAGTTCATGCGGTTCAAGGTGCACATGGAGG
GCTCCATGAACGGCCACGAGTTCGAGATCGAGGGCGAGGGCGAGGGCCGCCCCTACGAGGGCAC
CCAGACCGCCAAGCTGAAGGTGACCAAGGGTGGCCCCCTGCCCTTCTCCTGGGACATCCTGTCC
CCTCAGTTCATGTACGGCTCCAGGGCCTTCATCAAGCACCCCGCCGACATCCCCGACTACTATA
AGCAGTCCTTCCCCGAGGGCTTCAAGTGGGAGCGCGTGATGAACTTCGAGGACGGCGGCGCCGT
GACCGTGACCCAGGACACCTCCCTGGAGGACGGCACCCTGATCTACAAGGTGAAGCTCCGCGGC
ACCAACTTCCCTCCTGACGGCCCCGTAATGCAGAAGAAGACAATGGGCTGGGAAGCGTCCACCG
AGCGGTTGTACCCCGAGGACGGCGTGCTGAAGGGCGACATTAAGATGGCCCTGCGCCTGAAGGA
CGGCGGCCGCTACCTGGCGGACTTCAAGACCACCTACAAGGCCAAGAAGCCCGTGCAGATGCCC
GGCGCCTACAACGTCGACCGCAAGTTGGACATCACCTCCCACAACGAGGACTACACCGTGGTGG
AACAGTACGAACGCTCCGAGGGCCGCCACTCCACCGGCGGCATGGACGAGCTGTACAAGTAATA
AGAGCTCGCTGATCAGCCTCGACTGTGCCTTCTAGTTGCCAGCCATCTGTTGTTTGCCCCTCCC
CCGTGCCTTCCTTGACCCTGGAAGGTGCCACTCCCACTGTCCTTTCCTAATAAAATGAGGAAAT
TGCATCGCATTGTCTGAGTAGGTGTCATTCTATTCTGGGGGGTGGGGTGGGGCAGGACAGCAAG
GGGGAGGATTGGGAAGACAATAGCAGGCATGCTGGGGATGCGGTGGGCTCTATGGAAGCTTGAA
TTCAGCTGACGTGCCTCGGACCGCTAGGAACCCCTAGTGATGGAGTTGGCCACTCCCTCTCTGC
GCGCTCGCTCGCTCACTGAGGCCGGGCGACCAAAGGTCGCCCGACGCCCGGGCTTTGCCCGGGC
GGCCTCAGTGAGCGAGCGAGCGCGCAGCTGCCTGCAGGGGCGCCTGATGCGGTATTTTCTCCTT
ACGCATCTGTGCGGTATTTCACACCGCATACGTCAAAGCAACCATAGTACGCGCCCTGTAGCGG
CGCATTAAGCGCGGCGGGTGTGGTGGTTACGCGCAGCGTGACCGCTACACTTGCCAGCGCCCTA
GCGCCCGCTCCTTTCGCTTTCTTCCCTTCCTTTCTCGCCACGTTCGCCGGCTTTCCCCGTCAAG
CTCTAAATCGGGGGCTCCCTTTAGGGTTCCGATTTAGTGCTTTACGGCACCTCGACCCCAAAAA
ACTTGATTTGGGTGATGGTTCACGTAGTGGGCCATCGCCCTGATAGACGGTTTTTCGCCCTTTG
ACGTTGGAGTCCACGTTCTTTAATAGTGGACTCTTGTTCCAAACTGGAACAACACTCAACCCTA
TCTCGGGCTATTCTTTTGATTTATAAGGGATTTTGCCGATTTCGGCCTATTGGTTAAAAAATGA
GCTGATTTAACAAAAATTTAACGCGAATTTTAACAAAATATTAACGTTTACAATTTTATGGTGC
ACTCTCAGTACAATCTGCTCTGATGCCGCATAGTTAAGCCAGCCCCGACACCCGCCAACACCCG
CTGACGCGCCCTGACGGGCTTGTCTGCTCCCGGCATCCGCTTACAGACAAGCTGTGACCGTCTC
CGGGAGCTGCATGTGTCAGAGGTTTTCACCGTCATCACCGAAACGCGCGAGACGAAAGGGCCTC
GTGATACGCCTATTTTTATAGGTTAATGTCATGAACAATAAAACTGTCTGCTTACATAAACAGT
AATACAAGGGGTGTTATGAGCCATATTCAACGGGAAACGTCGAGGCCGCGATTAAATTCCAACA
TGGATGCTGATTTATATGGGTATAAATGGGCTCGCGATAATGTCGGGCAATCAGGTGCGACAAT
CTATCGCTTGTATGGGAAGCCCGATGCGCCAGAGTTGTTTCTGAAACATGGCAAAGGTAGCGTT
GCCAATGATGTTACAGATGAGATGGTCAGACTAAACTGGCTGACGGAATTTATGCCTCTTCCGA
CCATCAAGCATTTTATCCGTACTCCTGATGATGCATGGTTACTCACCACTGCGATCCCCGGAAA
AACAGCATTCCAGGTATTAGAAGAATATCCTGATTCAGGTGAAAATATTGTTGATGCGCTGGCA
GTGTTCCTGCGCCGGTTGCATTCGATTCCTGTTTGTAATTGTCCTTTTAACAGCGATCGCGTAT
TTCGTCTCGCTCAGGCGCAATCACGAATGAATAACGGTTTGGTTGATGCGAGTGATTTTGATGA
CGAGCGTAATGGCTGGCCTGTTGAACAAGTCTGGAAAGAAATGCATAAACTTTTGCCATTCTCA
CCGGATTCAGTCGTCACTCATGGTGATTTCTCACTTGATAACCTTATTTTTGACGAGGGGAAAT
TAATAGGTTGTATTGATGTTGGACGAGTCGGAATCGCAGACCGATACCAGGATCTTGCCATCCT
ATGGAACTGCCTCGGTGAGTTTTCTCCTTCATTACAGAAACGGCTTTTTCAAAAATATGGTATT
GATAATCCTGATATGAATAAATTGCAGTTTCATTTGATGCTCGATGAGTTTTTCTAATCTCATG
ACCAAAATCCCTTAACGTGAGTTTTCGTTCCACTGAGCGTCAGACCCCGTAGAAAAGATCAAAG
GATCTTCTTGAGATCCTTTTTTTCTGCGCGTAATCTGCTGCTTGCAAACAAAAAAACCACCGCT
ACCAGCGGTGGTTTGTTTGCCGGATCAAGAGCTACCAACTCTTTTTCCGAAGGTAACTGGCTTC
AGCAGAGCGCAGATACCAAATACTGTCCTTCTAGTGTAGCCGTAGTTAGGCCACCACTTCAAGA
ACTCTGTAGCACCGCCTACATACCTCGCTCTGCTAATCCTGTTACCAGTGGCTGCTGCCAGTGG
CGATAAGTCGTGTCTTACCGGGTTGGACTCAAGACGATAGTTACCGGATAAGGCGCAGCGGTCG
GGCTGAACGGGGGGTTCGTGCACACAGCCCAGCTTGGAGCGAACGACCTACACCGAACTGAGAT
ACCTACAGCGTGAGCTATGAGAAAGCGCCACGCTTCCCGAAGGGAGAAAGGCGGACAGGTATCC
GGTAAGCGGCAGGGTCGGAACAGGAGAGCGCACGAGGGAGCTTCCAGGGGGAAACGCCTGGTAT
CTTTATAGTCCTGTCGGGTTTCGCCACCTCTGACTTGAGCGTCGATTTTTGTGATGCTCGTCAG
GGGGGCGGAGCCTATGGAAAAACGCCAGCAACGCGGCCTTTTTACGGTTCCTGGCCTTTTGCTG
GCCTTTTGCTCACATGT

[0370] Exemplary wildtype KCNQ4 Construct Sequences

Exemplary AAV2 ITR-CMV enhancer-CMV promoter-human KCNQ4-3x FLAG-T2A-
mScarlet-bGH poly(A) signal-AAV2 ITR sequence
(SEQ ID NO: 256)
CCTGCAGGCAGCTGCGCGCTCGCTCGCTCACTGAGGCCGCCCGGGCGTCGGGCGACCTTTGGTC
GCCCGGCCTCAGTGAGCGAGCGAGCGCGCAGAGAGGGAGTGGCCAACTCCATCACTAGGGGTTC
CTGCGGCCGCACGCGTCTAGATCCCATATATGGAGTTCCGCGTTACATAACTTACGGTAAATGG
CCCGCCTGGCTGACCGCCCAACGACCCCCGCCCATTGACGTCAATAATGACGTATGTTCCCATA
GTAACGCCAATAGGGACTTTCCATTGACGTCAATGGGTGGAGTATTTACGGTAAACTGCCCACT
TGGCAGTACATCAAGTGTATCATATGCCAAGTACGCCCCCTATTGACGTCAATGACGGTAAATG
GCCCGCCTGGCATTATGCCCAGTACATGACCTTATGGGACTTTCCTACTTGGCAGTACATCTAC
GTATTAGTCATCGCTATTACCATGGTGATGCGGTTTTGGCAGTACATCAATGGGCGTGGATAGC
GGTTTGACTCACGGGGATTTCCAAGTCTCCACCCCATTGACGTCAATGGGAGTTTGTTTTGGCA
CCAAAATCAACGGGACTTTCCAAAATGTCGTAACAACTCCGCCCCATTGACGCAAATGGGCGGT
AGGCGTGTACGGTGGGAGGTCTATATAAGCAGAGCTCGTTTAGTGAACCGTcagatcgcctgga
gacgcACCGGTGCCACCATGGCCGAGGCCCCCCCGCGCCGCCTCGGCCTGGGTCCCCCGCCCGG
GGACGCCCCCCGCGCGGAGCTAGTGGCGCTCACGGCCGTGCAGAGCGAACAGGGCGAGGCGGGC
GGGGGCGGCTCCCCGCGCCGCCTCGGCCTCCTGGGCAGCCCCCTGCCGCCGGGCGCGCCCCTCC
CTGGGCCGGGCTCCGGCTCGGGCTCCGCCTGCGGCCAGCGCTCCTCGGCCGCGCACAAGCGCTA
CCGCCGCCTGCAGAACTGGGTCTACAACGTGCTGGAGCGGCCCCGCGGCTGGGCCTTCGTCTAC
CACGTCTTCATATTTTTGCTGGTCTTCAGCTGCCTGGTGCTGTCTGTGCTGTCCACTATCCAGG
AGCACCAGGAACTTGCCAACGAGTGTCTCCTCATCTTGGAATTCGTGATGATCGTGGTTTTCGG
CTTGGAGTACATCGTCCGGGTCTGGTCCGCCGGATGCTGCTGCCGCTACCGAGGATGGCAGGGT
CGCTTCCGCTTTGCCAGAAAGCCCTTCTGTGTCATCGACTTCATCGTGTTCGTGGCCTCGGTGG
CCGTCATCGCCGCGGGTACCCAGGGCAACATCTTCGCCACGTCCGCGCTGCGCAGCATGCGCTT
CCTGCAGATCCTGCGCATGGTGCGCATGGACCGCCGCGGCGGCACCTGGAAGCTGCTGGGCTCA
GTGGTCTACGCGCATAGCAAGGAGCTGATCACCGCCTGGTACATCGGGTTCCTGGTGCTCATCT
TCGCCTCCTTCCTGGTCTACCTGGCTGAGAAGGACGCCAACTCCGACTTCTCCTCCTACGCCGA
CTCGCTCTGGTGGGGGACGATTACATTGACAACCATCGGCTATGGTGACAAGACACCGCACACA
TGGCTGGGCAGGGTCCTGGCTGCTGGCTTCGCCTTACTGGGCATCTCTTTCTTTGCCCTGCCTG
CCGGCATCCTAGGCTCCGGCTTTGCCCTGAAGGTCCAGGAGCAGCACCGGCAGAAGCACTTCGA
GAAGCGGAGGATGCCGGCAGCCAACCTCATCCAGGCTGCCTGGCGCCTGTACTCCACCGATATG
AGCCGGGCCTACCTGACAGCCACCTGGTACTACTATGACAGTATCCTCCCATCCTTCAGAGAGC
TGGCCCTCTTGTTTGAGCACGTGCAACGGGCCCGCAATGGGGGCCTACGGCCCCTGGAGGTGCG
GCGGGCGCCGGTACCCGACGGAGCACCCTCCCGTTACCCGCCCGTTGCCACCTGCCACCGGCCG
GGCAGCACCTCCTTCTGCCCTGGGGAAAGCAGCCGGATGGGCATCAAAGACCGCATCCGCATGG
GCAGCTCCCAGCGGCGGACGGGTCCTTCCAAGCAGCATCTGGCACCTCCAACAATGCCCACCTC
CCCAAGCAGCGAGCAGGTGGGTGAGGCCACCAGCCCCACCAAGGTGCAAAAGAGCTGGAGCTTC
AATGACCGCACCCGCTTCCGGGCATCTCTGAGACTCAAACCCCGCACCTCTGCTGAGGATGCCC
CCTCAGAGGAAGTAGCAGAGGAGAAGAGCTACCAGTGTGAGCTCACGGTGGACGACATCATGCC
TGCTGTGAAGACAGTCATCCGCTCCATCAGGATTCTCAAGTTCCTGGTGGCCAAAAGGAAATTC
AAGGAGACACTGCGACCGTACGACGTGAAGGACGTCATTGAGCAGTACTCAGCAGGCCACCTGG
ACATGCTGGGCCGGATCAAGAGCCTGCAAACTCGGGTGGACCAAATTGTGGGTCGGGGGCCCGG
GGACAGGAAGGCCCGGGAGAAGGGCGACAAGGGGCCCTCCGACGCGGAGGTGGTGGATGAAATC
AGCATGATGGGACGCGTGGTCAAGGTGGAGAAGCAGGTGCAGTCCATCGAGCACAAGCTGGACC
TGCTGTTGGGCTTCTATTCGCGCTGCCTGCGCTCTGGCACCTCGGCCAGCCTGGGCGCCGTGCA
AGTGCCGCTGTTCGACCCCGACATCACCTCCGACTACCACAGCCCTGTGGACCACGAGGACATC
TCCGTCTCCGCACAGACGCTCAGCATCTCCCGCTCGGTCAGCACCAACATGGACGGATCCCGGG
CTGAGTACAAAGACCATGACGGTGATTATAAAGATCATGACATCGACTACAAGGATGACGATGA
CAAGGGCTCCGGAGAGGGCAGAGGAAGTCTGCTAACATGCGGTGACGTCGAGGAGAATCCTGGC
CCAATGGTGAGCAAGGGCGAGGCAGTGATCAAGGAGTTCATGCGGTTCAAGGTGCACATGGAGG
GCTCCATGAACGGCCACGAGTTCGAGATCGAGGGCGAGGGCGAGGGCCGCCCCTACGAGGGCAC
CCAGACCGCCAAGCTGAAGGTGACCAAGGGTGGCCCCCTGCCCTTCTCCTGGGACATCCTGTCC
CCTCAGTTCATGTACGGCTCCAGGGCCTTCATCAAGCACCCCGCCGACATCCCCGACTACTATA
AGCAGTCCTTCCCCGAGGGCTTCAAGTGGGAGCGCGTGATGAACTTCGAGGACGGCGGCGCCGT
GACCGTGACCCAGGACACCTCCCTGGAGGACGGCACCCTGATCTACAAGGTGAAGCTCCGCGGC
ACCAACTTCCCTCCTGACGGCCCCGTAATGCAGAAGAAGACAATGGGCTGGGAAGCGTCCACCG
AGCGGTTGTACCCCGAGGACGGCGTGCTGAAGGGCGACATTAAGATGGCCCTGCGCCTGAAGGA
CGGCGGCCGCTACCTGGCGGACTTCAAGACCACCTACAAGGCCAAGAAGCCCGTGCAGATGCCC
GGCGCCTACAACGTCGACCGCAAGTTGGACATCACCTCCCACAACGAGGACTACACCGTGGTGG
AACAGTACGAACGCTCCGAGGGCCGCCACTCCACCGGCGGCATGGACGAGCTGTACAAGTAATA
AGAGCTCGCTGATCAGCCTCGACTGTGCCTTCTAGTTGCCAGCCATCTGTTGTTTGCCCCTCCC
CCGTGCCTTCCTTGACCCTGGAAGGTGCCACTCCCACTGTCCTTTCCTAATAAAATGAGGAAAT
TGCATCGCATTGTCTGAGTAGGTGTCATTCTATTCTGGGGGGTGGGGTGGGGCAGGACAGCAAG
GGGGAGGATTGGGAAGACAATAGCAGGCATGCTGGGGATGCGGTGGGCTCTATGGAAGCTTGAA
TTCAGCTGACGTGCCTCGGACCGCTAGGAACCCCTAGTGATGGAGTTGGCCACTCCCTCTCTGC
GCGCTCGCTCGCTCACTGAGGCCGGGCGACCAAAGGTCGCCCGACGCCCGGGCTTTGCCCGGGC
GGCCTCAGTGAGCGAGCGAGCGCGCAGCTGCCTGCAGG
Exemplary AAV2 ITR-CMV enhancer-CMV promoter-mouse KCNQ4-3x FLAG-T2A-
mScarlet-bGH poly(A) signal-AAV2 ITR sequence
(SEQ ID NO: 257)
CCTGCAGGCAGCTGCGCGCTCGCTCGCTCACTGAGGCCGCCCGGGCGTCGGGCGACCTTTGGTC
GCCCGGCCTCAGTGAGCGAGCGAGCGCGCAGAGAGGGAGTGGCCAACTCCATCACTAGGGGTTC
CTGCGGCCGCACGCGTCTAGATCCCATATATGGAGTTCCGCGTTACATAACTTACGGTAAATGG
CCCGCCTGGCTGACCGCCCAACGACCCCCGCCCATTGACGTCAATAATGACGTATGTTCCCATA
GTAACGCCAATAGGGACTTTCCATTGACGTCAATGGGTGGAGTATTTACGGTAAACTGCCCACT
TGGCAGTACATCAAGTGTATCATATGCCAAGTACGCCCCCTATTGACGTCAATGACGGTAAATG
GCCCGCCTGGCATTATGCCCAGTACATGACCTTATGGGACTTTCCTACTTGGCAGTACATCTAC
GTATTAGTCATCGCTATTACCATGGTGATGCGGTTTTGGCAGTACATCAATGGGCGTGGATAGC
GGTTTGACTCACGGGGATTTCCAAGTCTCCACCCCATTGACGTCAATGGGAGTTTGTTTTGGCA
CCAAAATCAACGGGACTTTCCAAAATGTCGTAACAACTCCGCCCCATTGACGCAAATGGGCGGT
AGGCGTGTACGGTGGGAGGTCTATATAAGCAGAGCTCGTTTAGTGAACCGTcagatcgcctgga
gacgcACCGGTGCCACCATGGCCGAGGCCCCCCCGCGCCGCCTCGGCCTGGGCCCCCCGCCCGG
GGACGCCCCCCGCGCGGAGTTGGTGGCGCTCACGGCCGTGCAGAGTGAACAGGGCGAGGCGGGC
GGGGGCGGCTCTCCGCGTCGCCTCGGCCTTCTGGGCAGCCCCCTGCCGCCGGGCGCGCCCCTCC
CTGGGCCGGGCTCCGGCTCGGGCTCCGCCTGCGGCGGCCAGCGCTCCTCCGCCGCGCAGAAGCG
CTACCGCCGCCTGCAGAACTGGGTCTACAACGTGCTGGAGCGGCCCCGCGGGTGGGCCTTCGTC
TACCACGTCTTCATATTTTTGCTAGTCTTCAGCTGCCTGGTGCTGTCTGTACTGTCCACCATCC
AGGAGCACCAGGAACTTGCCAACGAGTGTCTCCTTATCTTGGAATTCGTGATGATTGTGGTCTT
TGGCTTGGAGTATATAATCCGTGTCTGGTCGGCCGGATGCTGTTGTCGCTACAGAGGATGGCAG
GGACGCTTTCGCTTCGCCAGGAAACCCTTCTGTGTCATCGACTTCATCGTGTTCGTGGCCTCGG
TGGCAGTGATAGCTGCGGGCACACAAGGCAACATCTTTGCTACGTCCGCGTTGCGCAGTATGCG
CTTCCTACAGATCCTGCGCATGGTGCGTATGGATCGCCGCGGTGGCACCTGGAAGCTGTTGGGA
TCCGTGGTCTATGCGCACAGTAAGGAGCTGATCACCGCCTGGTACATCGGGTTCCTGGTGCTCA
TCTTTGCCTCTTTCCTGGTCTACCTGGCTGAGAAGGATGCCAACTCTGACTTCTCCTCCTATGC
CGACTCGCTCTGGTGGGGGACGATCACACTGACGACCATTGGCTATGGTGACAAGACGCCACAT
ACATGGCTGGGCAGGGTTCTGGCTGCCGGCTTCGCCTTACTGGGCATCTCCTTCTTTGCCCTGC
CTGCCGGCATCCTGGGCTCTGGCTTTGCCCTGAAGGTCCAGGAGCAGCACAGGCAGAAGCACTT
TGAGAAGCGCAGGATGCCAGCAGCTAATCTCATCCAGGCTGCGTGGCGCCTGTACTCCACGGAC
ACAAGCCGGGCCTATTTGACAGCCACCTGGTATTACTATGACAGCATTCTCCCATCTTTCAGAG
AGCTGGCCCTCTTGTTTGAGCACATACAACGGGCCCGCAATGGGGGCTTACGGCCCCTGGAGGT
GAGGCGGGCGCCAGTACCTGATGGAGCGCCCTCTCGCTACCCGCCCGTTGCCACCTGCCACCGG
CCAGGCAGTGCCTCCTTCTGCCCTGGGGAAAGCAGCCGGATGGGCATCAAAGACCGAATCCGCA
TAAGCAGCTCCCAGAAGCGGACAGGCCCCTCCAAGCAGCATCTGGCCCCTCCGCCGATTCCCAC
CTCGCCAAGCAGTGAGCAGGTGGGCGAGGCATCCAGCCCCAGCAAGGTGCAGAAAAGCTGGAGC
TTCAATGACCGCACCCGCTTCCGGGCCTCTCTAAGACTCAAGCCTCGCTGCTCTGCTGAGGAGG
GCCCCTCAGAGGAAGTGGCCGAGGAGAAGAGCTACCAGTGTGAGCTTACGGTGGATGATGTCAT
GCCTGCTGTGAAGACGGTCATCCGTTCTGTCAGGATTCTGAAGTTCCTGGTAGCCAAAAGGAAA
TTCAAGGAGACGCTGCGGCCATATGATGTGAAGGATGTCATTGAGCAGTATTCAGCAGGACACC
TGGACATGCTGGGACGAATCAAGAGCCTGCAAGCCCGGGTGGACCAAATTGTGGGTCGGGGCCC
TGGGGACCGCAAGACTCGGGAGAAGGGCGATAAGGGTCCTTCAGACACGGAGGCAGTGGATGAA
ATCAGCATGATGGGGCGCGTAGTCAAGGTGGAAAAGCAGGTGCAGTCCATCGAACATAAGTTGG
ATCTGCTGCTGGGCTTCTACTCGCGCTGCCTCCGCTCTGGCACCTCGGCCAGCCTGGGCACTGT
GCAAGTGCCGCTCTTCGACCCCGACATCACCTCGGACTACCACAGCCCTGTAGACCACGAGGAC
ATCTCTGTCTCCGCACAGACGCTCAGCATCTCTCGCTCAGTCAGCACCAACATGGACGGATCCC
GGGCTGACTACAAAGACCATGACGGTGATTATAAAGATCATGACATCGACTACAAGGATGACGA
TGACAAGGGCTCCGGAGAGGGCAGAGGAAGTCTGCTAACATGCGGTGACGTCGAGGAGAATCCT
GGCCCAATGGTGAGCAAGGGCGAGGCAGTGATCAAGGAGTTCATGCGGTTCAAGGTGCACATGG
AGGGCTCCATGAACGGCCACGAGTTCGAGATCGAGGGCGAGGGCGAGGGCCGCCCCTACGAGGG
CACCCAGACCGCCAAGCTGAAGGTGACCAAGGGTGGCCCCCTGCCCTTCTCCTGGGACATCCTG
TCCCCTCAGTTCATGTACGGCTCCAGGGCCTTCATCAAGCACCCCGCCGACATCCCCGACTACT
ATAAGCAGTCCTTCCCCGAGGGCTTCAAGTGGGAGCGCGTGATGAACTTCGAGGACGGCGGCGC
CGTGACCGTGACCCAGGACACCTCCCTGGAGGACGGCACCCTGATCTACAAGGTGAAGCTCCGC
GGCACCAACTTCCCTCCTGACGGCCCCGTAATGCAGAAGAAGACAATGGGCTGGGAAGCGTCCA
CCGAGCGGTTGTACCCCGAGGACGGCGTGCTGAAGGGCGACATTAAGATGGCCCTGCGCCTGAA
GGACGGCGGCCGCTACCTGGCGGACTTCAAGACCACCTACAAGGCCAAGAAGCCCGTGCAGATG
CCCGGCGCCTACAACGTCGACCGCAAGTTGGACATCACCTCCCACAACGAGGACTACACCGTGG
TGGAACAGTACGAACGCTCCGAGGGCCGCCACTCCACCGGCGGCATGGACGAGCTGTACAAGTA
ATAAGAGCTCGCTGATCAGCCTCGACTGTGCCTTCTAGTTGCCAGCCATCTGTTGTTTGCCCCT
CCCCCGTGCCTTCCTTGACCCTGGAAGGTGCCACTCCCACTGTCCTTTCCTAATAAAATGAGGA
AATTGCATCGCATTGTCTGAGTAGGTGTCATTCTATTCTGGGGGGTGGGGTGGGGCAGGACAGC
AAGGGGGAGGATTGGGAAGACAATAGCAGGCATGCTGGGGATGCGGTGGGCTCTATGGAAGCTT
GAATTCAGCTGACGTGCCTCGGACCGCTAGGAACCCCTAGTGATGGAGTTGGCCACTCCCTCTC
TGCGCGCTCGCTCGCTCACTGAGGCCGGGCGACCAAAGGTCGCCCGACGCCCGGGCTTTGCCCG
GGCGGCCTCAGTGAGCGAGCGAGCGCGCAGCTGCCTGCAGG

[0371] Exemplary U6shRNA-hKCNQ4 Construct Sequences

Exemplary LucT2AGFP-U6shRNA-hKCNQ4 without a specific shRNA sequence
(SEQ ID NO: 258)
CTGCGCGCTCGCTCGCTCACTGAGGCCGCCCGGGCGTCGGGCGACCTTTGGTCGCCCGGCCTCA
GTGAGCGAGCGAGCGCGCAGAGAGGGAGTGGCCAACTCCATCACTAGGGGTTCCTGCGGCCGCA
CGCGTCTAGATCCCATATATGGAGTTCCGCGTTACATAACTTACGGTAAATGGCCCGCCTGGCT
GACCGCCCAACGACCCCCGCCCATTGACGTCAATAATGACGTATGTTCCCATAGTAACGCCAAT
AGGGACTTTCCATTGACGTCAATGGGTGGAGTATTTACGGTAAACTGCCCACTTGGCAGTACAT
CAAGTGTATCATATGCCAAGTACGCCCCCTATTGACGTCAATGACGGTAAATGGCCCGCCTGGC
ATTATGCCCAGTACATGACCTTATGGGACTTTCCTACTTGGCAGTACATCTACGTATTAGTCAT
CGCTATTACCATGGTGATGCGGTTTTGGCAGTACATCAATGGGCGTGGATAGCGGTTTGACTCA
CGGGGATTTCCAAGTCTCCACCCCATTGACGTCAATGGGAGTTTGTTTTGGCACCAAAATCAAC
GGGACTTTCCAAAATGTCGTAACAACTCCGCCCCATTGACGCAAATGGGCGGTAGGCGTGTACG
GTGGGAGGTCTATATAAGCAGAGCTCGTTTAGTGAACCGTCAGATCGCCTGGAGACGCACCGGT
GCCACCATGGAAGATGCCAAAAACATTAAGAAGGGCCCAGCGCCATTCTACCCACTCGAAGACG
GGACCGCCGGCGAGCAGCTGCACAAAGCCATGAAGCGCTACGCCCTGGTGCCCGGCACCATCGC
CTTTACCGACGCACATATCGAGGTGGACATTACCTACGCCGAGTACTTCGAGATGAGCGTTCGG
CTGGCAGAAGCTATGAAGCGCTATGGGCTGAATACAAACCATCGGATCGTGGTGTGCAGCGAGA
ATAGCTTGCAGTTCTTCATGCCCGTGTTGGGTGCCCTGTTCATCGGTGTGGCTGTGGCCCCAGC
TAACGACATCTACAACGAGCGCGAGCTGCTGAACAGCATGGGCATCAGCCAGCCCACCGTCGTA
TTCGTGAGCAAGAAAGGGCTGCAAAAGATCCTCAACGTGCAAAAGAAGCTACCGATCATACAAA
AGATCATCATCATGGATAGCAAGACCGACTACCAGGGCTTCCAAAGCATGTACACCTTCGTGAC
TTCCCATTTGCCACCCGGCTTCAACGAGTACGACTTCGTGCCCGAGAGCTTCGACCGGGACAAA
ACCATCGCCCTGATCATGAACAGTAGTGGCAGTACCGGATTGCCCAAGGGCGTAGCCCTACCGC
ACCGCACCGCTTGTGTCCGATTCAGTCATGCCCGCGACCCCATCTTCGGCAACCAGATCATCCC
CGACACCGCTATCCTCAGCGTGGTGCCATTTCACCACGGCTTCGGCATGTTCACCACGCTGGGC
TACTTGATCTGCGGCTTTCGGGTCGTGCTCATGTACCGCTTCGAGGAGGAGCTATTCTTGCGCA
GCTTGCAAGACTATAAGATTCAATCTGCCCTGCTGGTGCCCACACTATTTAGCTTCTTCGCTAA
GAGCACTCTCATCGACAAGTACGACCTAAGCAACTTGCACGAGATCGCCAGCGGCGGGGCGCCG
CTCAGCAAGGAGGTAGGTGAGGCCGTGGCCAAACGCTTCCACCTACCAGGCATCCGCCAGGGCT
ACGGCCTGACAGAAACAACCAGCGCCATTCTGATCACCCCCGAAGGGGACGACAAGCCTGGCGC
AGTAGGCAAGGTGGTGCCCTTCTTCGAGGCTAAGGTGGTGGACTTGGACACAGGTAAGACACTG
GGTGTGAACCAGCGCGGCGAGCTGTGCGTCCGTGGCCCCATGATCATGAGCGGCTACGTTAACA
ACCCCGAGGCTACAAACGCTCTCATCGACAAGGACGGCTGGCTGCACAGCGGCGACATCGCCTA
CTGGGACGAGGACGAGCACTTCTTCATCGTGGACCGGCTGAAGAGCCTGATCAAATACAAGGGC
TACCAGGTAGCCCCAGCCGAACTGGAGAGCATCCTGCTGCAACACCCCAACATCTTCGACGCCG
GGGTCGCCGGCCTGCCCGACGACGATGCCGGCGAGCTGCCCGCCGCAGTCGTCGTGCTGGAACA
CGGTAAAACCATGACCGAGAAGGAGATCGTGGACTATGTGGCCAGCCAGGTTACAACCGCCAAG
AAGCTGCGCGGTGGTGTTGTGTTCGTGGACGAGGTGCCTAAAGGACTGACCGGCAAGTTGGACG
CCCGCAAGATCCGCGAGATTCTCATTAAGGCCAAGAAGGGCGGCAAGATCGCCGTGGGCTCCGG
AGAGGGCAGAGGAAGTCTGCTAACATGCGGTGACGTCGAGGAGAATCCTGGCCCAATGGAGAGC
GACGAGAGCGGCCTGCCCGCCATGGAGATCGAGTGCCGCATCACCGGCACCCTGAACGGCGTGG
AGTTCGAGCTGGTGGGCGGCGGAGAGGGCACCCCCGAGCAGGGCCGCATGACCAACAAGATGAA
GAGCACCAAAGGCGCCCTGACCTTCAGCCCCTACCTGCTGAGCCACGTGATGGGCTACGGCTTC
TACCACTTCGGCACCTACCCCAGCGGCTACGAGAACCCCTTCCTGCACGCCATCAACAACGGCG
GCTACACCAACACCCGCATCGAGAAGTACGAGGACGGCGGCGTGCTGCACGTGAGCTTCAGCTA
CCGCTACGAGGCCGGCCGCGTGATCGGCGACTTCAAGGTGATGGGCACCGGCTTCCCCGAGGAC
AGCGTGATCTTCACCGACAAGATCATCCGCAGCAACGCCACCGTGGAGCACCTGCACCCCATGG
GCGATAACGATCTGGATGGCAGCTTCACCCGCACCTTCAGCCTGCGCGACGGCGGCTACTACAG
CTCCGTGGTGGACAGCCACATGCACTTCAAGAGCGCCATCCACCCCAGCATCCTGCAGAACGGG
GGCCCCATGTTCGCCTTCCGCCGCGTGGAGGAGGATCACAGCAACACCGAGCTGGGCATCGTGG
AGTACCAGCACGCCTTCAAGACCCCGGATGCAGATGCCGGTGAAGAATAAGAGCTCGCTGATCA
GCCTCGATAAGATACATTGATGAGTTTGGAGAAACCACAACTAGAATGCAGTGAAAAAAATGCT
TTATTTGTGAAATTTGTGATGCTATTGCTTTATTTGTAACCATTATAAGCTGCAATAAACAAGT
TTTAATTAAGGTCGGGCAGGAAGAGGGCCTATTTCCCATGATTCCTTCATATTTGCATATACGA
TACAAGGCTGTTAGAGAGATAATTAGAATTAATTTGAGTGTAAACACAAAGATATTAGTAGAAA
ATACGTGACGTAGAAAGTAATAATTTCTTGGGTAGTTTGCAGTTTTAAAATTATGTTTTAAAAT
GGACTATCATATGCTTACCGTAACTTGAAAGTATTTCGATTTCTTGGCTTTATATATCTTGTGG
AAAGGACGAAACACCGNNNNNTTTTTTAAGCTTTTTTGAATTCAGCTGACGTGCCTCGGACCGC
TAGGAACCCCTAGTGATGGAGTTGGCCACTCCCTCTCTGCGCGCTCGCTCGCTCACTGAGGCCG
GGCGACCAAAGGTCGCCCGACGCCCGGGCTTTGCCCGGGCGGCCTCAGTGAGCGAGCGAGCGCG
CAG
Exemplary pITR.CMV.LucT2AGFP-U6shRNA-hKCNQ4-395 sequence
(SEQ ID NO: 259)
CTGCGCGCTCGCTCGCTCACTGAGGCCGCCCGGGCGTCGGGCGACCTTTGGTCGCCCGGCCTCA
GTGAGCGAGCGAGCGCGCAGAGAGGGAGTGGCCAACTCCATCACTAGGGGTTCCTGCGGCCGCA
CGCGTCTAGATCCCATATATGGAGTTCCGCGTTACATAACTTACGGTAAATGGCCCGCCTGGCT
GACCGCCCAACGACCCCCGCCCATTGACGTCAATAATGACGTATGTTCCCATAGTAACGCCAAT
AGGGACTTTCCATTGACGTCAATGGGTGGAGTATTTACGGTAAACTGCCCACTTGGCAGTACAT
CAAGTGTATCATATGCCAAGTACGCCCCCTATTGACGTCAATGACGGTAAATGGCCCGCCTGGC
ATTATGCCCAGTACATGACCTTATGGGACTTTCCTACTTGGCAGTACATCTACGTATTAGTCAT
CGCTATTACCATGGTGATGCGGTTTTGGCAGTACATCAATGGGCGTGGATAGCGGTTTGACTCA
CGGGGATTTCCAAGTCTCCACCCCATTGACGTCAATGGGAGTTTGTTTTGGCACCAAAATCAAC
GGGACTTTCCAAAATGTCGTAACAACTCCGCCCCATTGACGCAAATGGGCGGTAGGCGTGTACG
GTGGGAGGTCTATATAAGCAGAGCTCGTTTAGTGAACCGTCAGATCGCCTGGAGACGCACCGGT
GCCACCATGGAAGATGCCAAAAACATTAAGAAGGGCCCAGCGCCATTCTACCCACTCGAAGACG
GGACCGCCGGCGAGCAGCTGCACAAAGCCATGAAGCGCTACGCCCTGGTGCCCGGCACCATCGC
CTTTACCGACGCACATATCGAGGTGGACATTACCTACGCCGAGTACTTCGAGATGAGCGTTCGG
CTGGCAGAAGCTATGAAGCGCTATGGGCTGAATACAAACCATCGGATCGTGGTGTGCAGCGAGA
ATAGCTTGCAGTTCTTCATGCCCGTGTTGGGTGCCCTGTTCATCGGTGTGGCTGTGGCCCCAGC
TAACGACATCTACAACGAGCGCGAGCTGCTGAACAGCATGGGCATCAGCCAGCCCACCGTCGTA
TTCGTGAGCAAGAAAGGGCTGCAAAAGATCCTCAACGTGCAAAAGAAGCTACCGATCATACAAA
AGATCATCATCATGGATAGCAAGACCGACTACCAGGGCTTCCAAAGCATGTACACCTTCGTGAC
TTCCCATTTGCCACCCGGCTTCAACGAGTACGACTTCGTGCCCGAGAGCTTCGACCGGGACAAA
ACCATCGCCCTGATCATGAACAGTAGTGGCAGTACCGGATTGCCCAAGGGCGTAGCCCTACCGC
ACCGCACCGCTTGTGTCCGATTCAGTCATGCCCGCGACCCCATCTTCGGCAACCAGATCATCCC
CGACACCGCTATCCTCAGCGTGGTGCCATTTCACCACGGCTTCGGCATGTTCACCACGCTGGGC
TACTTGATCTGCGGCTTTCGGGTCGTGCTCATGTACCGCTTCGAGGAGGAGCTATTCTTGCGCA
GCTTGCAAGACTATAAGATTCAATCTGCCCTGCTGGTGCCCACACTATTTAGCTTCTTCGCTAA
GAGCACTCTCATCGACAAGTACGACCTAAGCAACTTGCACGAGATCGCCAGCGGCGGGGCGCCG
CTCAGCAAGGAGGTAGGTGAGGCCGTGGCCAAACGCTTCCACCTACCAGGCATCCGCCAGGGCT
ACGGCCTGACAGAAACAACCAGCGCCATTCTGATCACCCCCGAAGGGGACGACAAGCCTGGCGC
AGTAGGCAAGGTGGTGCCCTTCTTCGAGGCTAAGGTGGTGGACTTGGACACAGGTAAGACACTG
GGTGTGAACCAGCGCGGCGAGCTGTGCGTCCGTGGCCCCATGATCATGAGCGGCTACGTTAACA
ACCCCGAGGCTACAAACGCTCTCATCGACAAGGACGGCTGGCTGCACAGCGGCGACATCGCCTA
CTGGGACGAGGACGAGCACTTCTTCATCGTGGACCGGCTGAAGAGCCTGATCAAATACAAGGGC
TACCAGGTAGCCCCAGCCGAACTGGAGAGCATCCTGCTGCAACACCCCAACATCTTCGACGCCG
GGGTCGCCGGCCTGCCCGACGACGATGCCGGCGAGCTGCCCGCCGCAGTCGTCGTGCTGGAACA
CGGTAAAACCATGACCGAGAAGGAGATCGTGGACTATGTGGCCAGCCAGGTTACAACCGCCAAG
AAGCTGCGCGGTGGTGTTGTGTTCGTGGACGAGGTGCCTAAAGGACTGACCGGCAAGTTGGACG
CCCGCAAGATCCGCGAGATTCTCATTAAGGCCAAGAAGGGCGGCAAGATCGCCGTGGGCTCCGG
AGAGGGCAGAGGAAGTCTGCTAACATGCGGTGACGTCGAGGAGAATCCTGGCCCAATGGAGAGC
GACGAGAGCGGCCTGCCCGCCATGGAGATCGAGTGCCGCATCACCGGCACCCTGAACGGCGTGG
AGTTCGAGCTGGTGGGCGGCGGAGAGGGCACCCCCGAGCAGGGCCGCATGACCAACAAGATGAA
GAGCACCAAAGGCGCCCTGACCTTCAGCCCCTACCTGCTGAGCCACGTGATGGGCTACGGCTTC
TACCACTTCGGCACCTACCCCAGCGGCTACGAGAACCCCTTCCTGCACGCCATCAACAACGGCG
GCTACACCAACACCCGCATCGAGAAGTACGAGGACGGCGGCGTGCTGCACGTGAGCTTCAGCTA
CCGCTACGAGGCCGGCCGCGTGATCGGCGACTTCAAGGTGATGGGCACCGGCTTCCCCGAGGAC
AGCGTGATCTTCACCGACAAGATCATCCGCAGCAACGCCACCGTGGAGCACCTGCACCCCATGG
GCGATAACGATCTGGATGGCAGCTTCACCCGCACCTTCAGCCTGCGCGACGGCGGCTACTACAG
CTCCGTGGTGGACAGCCACATGCACTTCAAGAGCGCCATCCACCCCAGCATCCTGCAGAACGGG
GGCCCCATGTTCGCCTTCCGCCGCGTGGAGGAGGATCACAGCAACACCGAGCTGGGCATCGTGG
AGTACCAGCACGCCTTCAAGACCCCGGATGCAGATGCCGGTGAAGAATAAGAGCTCGCTGATCA
GCCTCGATAAGATACATTGATGAGTTTGGACAAACCACAACTAGAATGCAGTGAAAAAAATGCT
TTATTTGTGAAATTTGTGATGCTATTGCTTTATTTGTAACCATTATAAGCTGCAATAAACAAGT
TTTAATTAAGGTCGGGCAGGAAGAGGGCCTATTTCCCATGATTCCTTCATATTTGCATATACGA
TAGAAGGCTGTTAGAGAGATAATTAGAATTAATTTGACTGTAAACACAAAGATATTAGTAGAAA
ATACGTGACGTAGAAAGTAATAATTTCTTGGGTAGTTTGCAGTTTTAAAATTATGTTTTAAAAT
GGACTATCATATGCTTACCGTAACTTGAAAGTATTTCGATTTCTTGGCTTTATATATCTTGTGG
AAAGGACGAAACACCGTCCTCATCTTGGAATTCGTGATGCGAACATCACGAATTCCAAGATGAG
GATTTTTTAAGCTTTTTTGAATTCAGCTGACGTGCCTCGGACCGCTAGGAACCCCTAGTGATGG
AGTTGGCCACTCCCTCTCTGCGCGCTCGCTCGCTCACTGAGGCCGGGCGACCAAAGGTCGCCCG
ACGCCCGGGCTTTGCCCGGGCGGCCTCAGTGAGCGAGCGAGCGCGCAG
Exemplary pITR.CMV.LucT2AGFP-U6shRNA-hKCNQ4-909 sequence
(SEQ ID NO: 260)
CTGCGCGCTCGCTCGCTCACTGAGGCCGCCCGGGCGTCGGGCGACCTTTGGTCGCCCGGCCTCA
GTGAGCGAGCGAGCGCGCAGAGAGGGAGTGGCCAACTCCATCACTAGGGGTTCCTGCGGCCGCA
CGCGTCTAGATCCCATATATGGAGTTCCGCGTTACATAACTTACGGTAAATGGCCCGCCTGGCT
GACCGCCCAACGACCCCCGCCCATTGACGTCAATAATGACGTATGTTCCCATAGTAACGCCAAT
AGGGACTTTCCATTGACGTCAATGGGTGGAGTATTTACGGTAAACTGCCCACTTGGCAGTACAT
CAAGTGTATCATATGCCAAGTACGCCCCCTATTGACGTCAATGACGGTAAATGGCCCGCCTGGC
ATTATGCCCAGTACATGACCTTATGGGACTTTCCTACTTGGCAGTACATCTACGTATTAGTCAT
CGCTATTACCATGGTGATGCGGTTTTGGCAGTACATCAATGGGCGTGGATAGCGGTTTGACTCA
CGGGGATTTCCAAGTCTCCACCCCATTGACGTCAATGGGAGTTTGTTTTGGCACCAAAATCAAC
GGGACTTTCCAAAATGTCGTAACAACTCCGCCCCATTGACGCAAATGGGCGGTAGGCGTGTACG
GTGGGAGGTCTATATAAGCAGAGCTCGTTTAGTGAACCGTcagatcgcctggagacgcACCGGT
GCCACCATGGAAGATGCCAAAAACATTAAGAAGGGCCCAGCGCCATTCTACCCACTCGAAGACG
GGACCGCCGGCGAGCAGCTGCACAAAGCCATGAAGCGCTACGCCCTGGTGCCCGGCACCATCGC
CTTTACCGACGCACATATCGAGGTGGACATTACCTACGCCGAGTACTTCGAGATGAGCGTTCGG
CTGGCAGAAGCTATGAAGCGCTATGGGCTGAATACAAACCATCGGATCGTGGTGTGCAGCGAGA
ATAGCTTGCAGTTCTTCATGCCCGTGTTGGGTGCCCTGTTCATCGGTGTGGCTGTGGCCCCAGC
TAACGACATCTACAACGAGCGCGAGCTGCTGAACAGCATGGGCATCAGCCAGCCCACCGTCGTA
TTCGTGAGCAAGAAAGGGCTGCAAAAGATCCTCAACGTGCAAAAGAAGCTACCGATCATACAAA
AGATCATCATCATGGATAGCAAGACCGACTACCAGGGCTTCCAAAGCATGTACACCTTCGTGAC
TTCCCATTTGCCACCCGGCTTCAACGAGTACGACTTCGTGCCCGAGAGCTTCGACCGGGACAAA
ACCATCGCCCTGATCATGAACAGTAGTGGCAGTACCGGATTGCCCAAGGGCGTAGCCCTACCGC
ACCGCACCGCTTGTGTCCGATTCAGTCATGCCCGCGACCCCATCTTCGGCAACCAGATCATCCC
CGACACCGCTATCCTCAGCGTGGTGCCATTTCACCACGGCTTCGGCATGTTCACCACGCTGGGC
TACTTGATCTGCGGCTTTCGGGTCGTGCTCATGTACCGCTTCGAGGAGGAGCTATTCTTGCGCA
GCTTGCAAGACTATAAGATTCAATCTGCCCTGCTGGTGCCCACACTATTTAGCTTCTTCGCTAA
GAGCACTCTCATCGACAAGTACGACCTAAGCAACTTGCACGAGATCGCCAGCGGCGGGGCGCCG
CTCAGCAAGGAGGTAGGTGAGGCCGTGGCCAAACGCTTCCACCTACCAGGCATCCGCCAGGGCT
ACGGCCTGACAGAAACAACCAGCGCCATTCTGATCACCCCCGAAGGGGACGACAAGCCTGGCGC
AGTAGGCAAGGTGGTGCCCTTCTTCGAGGCTAAGGTGGTGGACTTGGACACAGGTAAGACACTG
GGTGTGAACCAGCGCGGCGAGCTGTGCGTCCGTGGCCCCATGATCATGAGCGGCTACGTTAACA
ACCCCGAGGCTACAAACGCTCTCATCGACAAGGACGGCTGGCTGCACAGCGGCGACATCGCCTA
CTGGGACGAGGACGAGCACTTCTTCATCGTGGACCGGCTGAAGAGCCTGATCAAATACAAGGGC
TACCAGGTAGCCCCAGCCGAACTGGAGAGCATCCTGCTGCAACACCCCAACATCTTCGACGCCG
GGGTCGCCGGCCTGCCCGACGACGATGCCGGCGAGCTGCCCGCCGCAGTCGTCGTGCTGGAACA
CGGTAAAACCATGACCGAGAAGGAGATCGTGGACTATGTGGCCAGCCAGGTTACAACCGCCAAG
AAGCTGCGCGGTGGTGTTGTGTTCGTGGACGAGGTGCCTAAAGGACTGACCGGCAAGTTGGACG
CCCGCAAGATCCGCGAGATTCTCATTAAGGCCAAGAAGGGCGGCAAGATCGCCGTGGGCTCCGG
AGAGGGCAGAGGAAGTCTGCTAACATGCGGTGACGTCGAGGAGAATCCTGGCCCAATGGAGAGC
GACGAGAGCGGCCTGCCCGCCATGGAGATCGAGTGCCGCATCACCGGCACCCTGAACGGCGTGG
AGTTCGAGCTGGTGGGCGGCGGAGAGGGCACCCCCGAGCAGGGCCGCATGACCAACAAGATGAA
GAGCACCAAAGGCGCCCTGACCTTCAGCCCCTACCTGCTGAGCCACGTGATGGGCTACGGCTTC
TACCACTTCGGCACCTACCCCAGCGGCTACGAGAACCCCTTCCTGCACGCCATCAACAACGGCG
GCTACACCAACACCCGCATCGAGAAGTACGAGGACGGCGGCGTGCTGCACGTGAGCTTCAGCTA
CCGCTACGAGGCCGGCCGCGTGATCGGCGACTTCAAGGTGATGGGCACCGGCTTCCCCGAGGAC
AGCGTGATCTTCACCGACAAGATCATCCGCAGCAACGCCACCGTGGAGCACCTGCACCCCATGG
GCGATAACGATCTGGATGGCAGCTTCACCCGCACCTTCAGCCTGCGCGACGGCGGCTACTACAG
CTCCGTGGTGGACAGCCACATGCACTTCAAGAGCGCCATCCACCCCAGCATCCTGCAGAACGGG
GGCCCCATGTTCGCCTTCCGCCGCGTGGAGGAGGATCACAGCAACACCGAGCTGGGCATCGTGG
AGTACCAGCACGCCTTCAAGACCCCGGATGCAGATGCCGGTGAAGAATAAGAGCTCGCTGATCA
GCCTCGATAAGATACATTGATGAGTTTGGAGAAACCACAACTAGAATGCAGTGAAAAAAATGCT
TTATTTGTGAAATTTGTGATGCTATTGCTTTATTTGTAACCATTATAAGCTGCAATAAACAAGT
TTTAATTAAGGTCGGGCAGGAAGAGGGCCTATTTCCCATGATTCCTTCATATTTGCATATACGA
TAGAAGGCTGTTAGAGAGATAATTAGAATTAATTTGACTGTAAACACAAAGATATTAGTAGAAA
ATACGTGACGTAGAAAGTAATAATTTCTTGGGTAGTTTGCAGTTTTAAAATTATGTTTTAAAAT
GGACTATCATATGCTTACCGTAACTTGAAAGTATTTCGATTTCTTGGCTTTATATATCTTGTGG
AAAGGACGAAACACCGCGCCTTACTGGGCATCTCTTTCTCGAAAGAAAGAGATGCCCAGTAAGG
CGTTTTTTAAGCTTTTTTGAATTCAGCTGACGTGCCTCGGACCGCTAGGAACCCCTAGTGATGG
AGTTGGCCACTCCCTCTCTGCGCGCTCGCTCGCTCACTGAGGCCGGGCGACCAAAGGTCGCCCG
ACGCCCGGGCTTTGCCCGGGCGGCCTCAGTGAGCGAGCGAGCGCGCAG
Exemplary pITR.CMV.LucT2AGFP-U6shRNA-hKCNQ4-1095 sequence
(SEQ ID NO: 261)
CTGCGCGCTCGCTCGCTCACTGAGGCCGCCCGGGCGTCGGGCGACCTTTGGTCGCCCGGCCTCA
GTGAGCGAGCGAGCGCGCAGAGAGGGAGTGGCCAACTCCATCACTAGGGGTTCCTGCGGCCGCA
CGCGTCTAGATCCCATATATGGAGTTCCGCGTTACATAACTTACGGTAAATGGCCCGCCTGGCT
GACCGCCCAACGACCCCCGCCCATTGACGTCAATAATGACGTATGTTCCCATAGTAACGCCAAT
AGGGACTTTCCATTGACGTCAATGGGTGGAGTATTTACGGTAAACTGCCCACTTGGCAGTACAT
CAAGTGTATCATATGCCAAGTACGCCCCCTATTGACGTCAATGACGGTAAATGGCCCGCCTGGC
ATTATGCCCAGTACATGACCTTATGGGACTTTCCTACTTGGCAGTACATCTACGTATTAGTCAT
CGCTATTACCATGGTGATGCGGTTTTGGCAGTACATCAATGGGCGTGGATAGCGGTTTGACTCA
CGGGGATTTCCAAGTCTCCACCCCATTGACGTCAATGGGAGTTTGTTTTGGCACCAAAATCAAC
GGGACTTTCCAAAATGTCGTAACAACTCCGCCCCATTGACGCAAATGGGCGGTAGGCGTGTACG
GTGGGAGGTCTATATAAGCAGAGCTCGTTTAGTGAACCGTcagatcgcctggagacgcACCGGT
GCCACCATGGAAGATGCCAAAAACATTAAGAAGGGCCCAGCGCCATTCTACCCACTCGAAGACG
GGACCGCCGGCGAGCAGCTGCACAAAGCCATGAAGCGCTACGCCCTGGTGCCCGGCACCATCGC
CTTTACCGACGCACATATCGAGGTGGACATTACCTACGCCGAGTACTTCGAGATGAGCGTTCGG
CTGGCAGAAGCTATGAAGCGCTATGGGCTGAATACAAACCATCGGATCGTGGTGTGCAGCGAGA
ATAGCTTGCAGTTCTTCATGCCCGTGTTGGGTGCCCTGTTCATCGGTGTGGCTGTGGCCCCAGC
TAACGACATCTACAACGAGCGCGAGCTGCTGAACAGCATGGGCATCAGCCAGCCCACCGTCGTA
TTCGTGAGCAAGAAAGGGCTGCAAAAGATCCTCAACGTGCAAAAGAAGCTACCGATCATACAAA
AGATCATCATCATGGATAGCAAGACCGACTACCAGGGCTTCCAAAGCATGTACACCTTCGTGAC
TTCCCATTTGCCACCCGGCTTCAACGAGTACGACTTCGTGCCCGAGAGCTTCGACCGGGACAAA
ACCATCGCCCTGATCATGAACAGTAGTGGCAGTACCGGATTGCCCAAGGGCGTAGCCCTACCGC
ACCGCACCGCTTGTGTCCGATTCAGTCATGCCCGCGACCCCATCTTCGGCAACCAGATCATCCC
CGACACCGCTATCCTCAGCGTGGTGCCATTTCACCACGGCTTCGGCATGTTCACCACGCTGGGC
TACTTGATCTGCGGCTTTCGGGTCGTGCTCATGTACCGCTTCGAGGAGGAGCTATTCTTGCGCA
GCTTGCAAGACTATAAGATTCAATCTGCCCTGCTGGTGCCCACACTATTTAGCTTCTTCGCTAA
GAGCACTCTCATCGACAAGTACGACCTAAGCAACTTGCACGAGATCGCCAGCGGCGGGGCGCCG
CTCAGCAAGGAGGTAGGTGAGGCCGTGGCCAAACGCTTCCACCTACCAGGCATCCGCCAGGGCT
ACGGCCTGACAGAAACAACCAGCGCCATTCTGATCACCCCCGAAGGGGACGACAAGCCTGGCGC
AGTAGGCAAGGTGGTGCCCTTCTTCGAGGCTAAGGTGGTGGACTTGGACACAGGTAAGACACTG
GGTGTGAACCAGCGCGGCGAGCTGTGCGTCCGTGGCCCCATGATCATGAGCGGCTACGTTAACA
ACCCCGAGGCTACAAACGCTCTCATCGACAAGGACGGCTGGCTGCACAGCGGCGACATCGCCTA
CTGGGACGAGGACGAGCACTTCTTCATCGTGGACCGGCTGAAGAGCCTGATCAAATACAAGGGC
TACCAGGTAGCCCCAGCCGAACTGGAGAGCATCCTGCTGCAACACCCCAACATCTTCGACGCCG
GGGTCGCCGGCCTGCCCGACGACGATGCCGGCGAGCTGCCCGCCGCAGTCGTCGTGCTGGAACA
CGGTAAAACCATGACCGAGAAGGAGATCGTGGACTATGTGGCCAGCCAGGTTACAACCGCCAAG
AAGCTGCGCGGTGGTGTTGTGTTCGTGGACGAGGTGCCTAAAGGACTGACCGGCAAGTTGGACG
CCCGCAAGATCCGCGAGATTCTCATTAAGGCCAAGAAGGGCGGCAAGATCGCCGTGGGCTCCGG
AGAGGGCAGAGGAAGTCTGCTAACATGCGGTGACGTCGAGGAGAATCCTGGCCCAATGGAGAGC
GACGAGAGCGGCCTGCCCGCCATGGAGATCGAGTGCCGCATCACCGGCACCCTGAACGGCGTGG
AGTTCGAGCTGGTGGGCGGCGGAGAGGGCACCCCCGAGCAGGGCCGCATGACCAACAAGATGAA
GAGCACCAAAGGCGCCCTGACCTTCAGCCCCTACCTGCTGAGCCACGTGATGGGCTACGGCTTC
TACCACTTCGGCACCTACCCCAGCGGCTACGAGAACCCCTTCCTGCACGCCATCAACAACGGCG
GCTACACCAACACCCGCATCGAGAAGTACGAGGACGGCGGCGTGCTGCACGTGAGCTTCAGCTA
CCGCTACGAGGCCGGCCGCGTGATCGGCGACTTCAAGGTGATGGGCACCGGCTTCCCCGAGGAC
AGCGTGATCTTCACCGACAAGATCATCCGCAGCAACGCCACCGTGGAGCACCTGCACCCCATGG
GCGATAACGATCTGGATGGCAGCTTCACCCGCACCTTCAGCCTGCGCGACGGCGGCTACTACAG
CTCCGTGGTGGACAGCCACATGCACTTCAAGAGCGCCATCCACCCCAGCATCCTGCAGAACGGG
GGCCCCATGTTCGCCTTCCGCCGCGTGGAGGAGGATCACAGCAACACCGAGCTGGGCATCGTGG
AGTACCAGCACGCCTTCAAGACCCCGGATGCAGATGCCGGTGAAGAATAAGAGCTCGCTGATCA
GCCTCGATAAGATACATTGATGAGTTTGGACAAACCACAACTAGAATGCAGTGAAAAAAATGCT
TTATTTGTGAAATTTGTGATGCTATTGCTTTATTTGTAACCATTATAAGCTGCAATAAACAAGT
TTTAATTAAGGTCGGGCAGGAAGAGGGCCTATTTCCCATGATTCCTTCATATTTGCATATACGA
TAGAAGGCTGTTAGAGAGATAATTAGAATTAATTTGACTGTAAACACAAAGATATTAGTAGAAA
ATACGTGACGTAGAAAGTAATAATTTCTTGGGTAGTTTGCAGTTTTAAAATTATGTTTTAAAAT
GGACTATCATATGCTTACCGTAACTTGAAAGTATTTCGATTTCTTGGCTTTATATATCTTGTGG
AAAGGACGAAACACCGCTGGTACTACTATGACAGTATCGAAATACTGTCATAGTAGTAGCAGTT
TTTTAAGCTTTTTTGAATTCAGCTGACGTGCCTCGGACCGCTAGGAACCCCTAGTGATGGAGTT
GGCCACTCCCTCTCTGCGCGCTCGCTCGCTCACTGAGGCCGGGCGACCAAAGGTCGCCCGACGC
CCGGGCTTTGCCCGGGCGGCCTCAGTGAGCGAGCGAGCGCGCAG
Exemplary pITR.CMV.LucT2AGFP-U6shRNA-hKCNQ4-1531 sequence
(SEQ ID NO: 262)
CTGCGCGCTCGCTCGCTCACTGAGGCCGCCCGGGCGTCGGGCGACCTTTGGTCGCCCGGCCTCA
GTGAGCGAGCGAGCGCGCAGAGAGGGAGTGGCCAACTCCATCACTAGGGGTTCCTGCGGCCGCA
CGCGTCTAGATCCCATATATGGAGTTCCGCGTTACATAACTTACGGTAAATGGCCCGCCTGGCT
GACCGCCCAACGACCCCCGCCCATTGACGTCAATAATGACGTATGTTCCCATAGTAACGCCAAT
AGGGACTTTCCATTGACGTCAATGGGTGGAGTATTTACGGTAAACTGCCCACTTGGCAGTACAT
CAAGTGTATCATATGCCAAGTACGCCCCCTATTGACGTCAATGACGGTAAATGGCCCGCCTGGC
ATTATGCCCAGTACATGACCTTATGGGACTTTCCTACTTGGCAGTACATCTACGTATTAGTCAT
CGCTATTACCATGGTGATGCGGTTTTGGCAGTACATCAATGGGCGTGGATAGCGGTTTGACTCA
CGGGGATTTCCAAGTCTCCACCCCATTGACGTCAATGGGAGTTTGTTTTGGCACCAAAATCAAC
GGGACTTTCCAAAATGTCGTAACAACTCCGCCCCATTGACGCAAATGGGCGGTAGGCGTGTACG
GTGGGAGGTCTATATAAGCAGAGCTCGTTTAGTGAACCGTcagatcgcctggagacgcACCGGT
GCCACCATGGAAGATGCCAAAAACATTAAGAAGGGCCCAGCGCCATTCTACCCACTCGAAGACG
GGACCGCCGGCGAGCAGCTGCACAAAGCCATGAAGCGCTACGCCCTGGTGCCCGGCACCATCGC
CTTTACCGACGCACATATCGAGGTGGACATTACCTACGCCGAGTACTTCGAGATGAGCGTTCGG
CTGGCAGAAGCTATGAAGCGCTATGGGCTGAATACAAACCATCGGATCGTGGTGTGCAGCGAGA
ATAGCTTGCAGTTCTTCATGCCCGTGTTGGGTGCCCTGTTCATCGGTGTGGCTGTGGCCCCAGC
TAACGACATCTACAACGAGCGCGAGCTGCTGAACAGCATGGGCATCAGCCAGCCCACCGTCGTA
TTCGTGAGCAAGAAAGGGCTGCAAAAGATCCTCAACGTGCAAAAGAAGCTACCGATCATACAAA
AGATCATCATCATGGATAGCAAGACCGACTACCAGGGCTTCCAAAGCATGTACACCTTCGTGAC
TTCCCATTTGCCACCCGGCTTCAACGAGTACGACTTCGTGCCCGAGAGCTTCGACCGGGACAAA
ACCATCGCCCTGATCATGAACAGTAGTGGCAGTACCGGATTGCCCAAGGGCGTAGCCCTACCGC
ACCGCACCGCTTGTGTCCGATTCAGTCATGCCCGCGACCCCATCTTCGGCAACCAGATCATCCC
CGACACCGCTATCCTCAGCGTGGTGCCATTTCACCACGGCTTCGGCATGTTCACCACGCTGGGC
TACTTGATCTGCGGCTTTCGGGTCGTGCTCATGTACCGCTTCGAGGAGGAGCTATTCTTGCGCA
GCTTGCAAGACTATAAGATTCAATCTGCCCTGCTGGTGCCCACACTATTTAGCTTCTTCGCTAA
GAGCACTCTCATCGACAAGTACGACCTAAGCAACTTGCACGAGATCGCCAGCGGCGGGGCGCCG
CTCAGCAAGGAGGTAGGTGAGGCCGTGGCCAAACGCTTCCACCTACCAGGCATCCGCCAGGGCT
ACGGCCTGACAGAAACAACCAGCGCCATTCTGATCACCCCCGAAGGGGACGACAAGCCTGGCGC
AGTAGGCAAGGTGGTGCCCTTCTTCGAGGCTAAGGTGGTGGACTTGGACACAGGTAAGACACTG
GGTGTGAACCAGCGCGGCGAGCTGTGCGTCCGTGGCCCCATGATCATGAGCGGCTACGTTAACA
ACCCCGAGGCTACAAACGCTCTCATCGACAAGGACGGCTGGCTGCACAGCGGCGACATCGCCTA
CTGGGACGAGGACGAGCACTTCTTCATCGTGGACCGGCTGAAGAGCCTGATCAAATACAAGGGC
TACCAGGTAGCCCCAGCCGAACTGGAGAGCATCCTGCTGCAACACCCCAACATCTTCGACGCCG
GGGTCGCCGGCCTGCCCGACGACGATGCCGGCGAGCTGCCCGCCGCAGTCGTCGTGCTGGAACA
CGGTAAAACCATGACCGAGAAGGAGATCGTGGACTATGTGGCCAGCCAGGTTACAACCGCCAAG
AAGCTGCGCGGTGGTGTTGTGTTCGTGGACGAGGTGCCTAAAGGACTGACCGGCAAGTTGGACG
CCCGCAAGATCCGCGAGATTCTCATTAAGGCCAAGAAGGGCGGCAAGATCGCCGTGGGCTCCGG
AGAGGGCAGAGGAAGTCTGCTAACATGCGGTGACGTCGAGGAGAATCCTGGCCCAATGGAGAGC
GACGAGAGCGGCCTGCCCGCCATGGAGATCGAGTGCCGCATCACCGGCACCCTGAACGGCGTGG
AGTTCGAGCTGGTGGGCGGCGGAGAGGGCACCCCCGAGCAGGGCCGCATGACCAACAAGATGAA
GAGCACCAAAGGCGCCCTGACCTTCAGCCCCTACCTGCTGAGCCACGTGATGGGCTACGGCTTC
TACCACTTCGGCACCTACCCCAGCGGCTACGAGAACCCCTTCCTGCACGCCATCAACAACGGCG
GCTACACCAACACCCGCATCGAGAAGTACGAGGACGGCGGCGTGCTGCACGTGAGCTTCAGCTA
CCGCTACGAGGCCGGCCGCGTGATCGGCGACTTCAAGGTGATGGGCACCGGCTTCCCCGAGGAC
AGCGTGATCTTCACCGACAAGATCATCCGCAGCAACGCCACCGTGGAGCACCTGCACCCCATGG
GCGATAACGATCTGGATGGCAGCTTCACCCGCACCTTCAGCCTGCGCGACGGCGGCTACTACAG
CTCCGTGGTGGACAGCCACATGCACTTCAAGAGCGCCATCCACCCCAGCATCCTGCAGAACGGG
GGCCCCATGTTCGCCTTCCGCCGCGTGGAGGAGGATCACAGCAACACCGAGCTGGGCATCGTGG
AGTACCAGCACGCCTTCAAGACCCCGGATGCAGATGCCGGTGAAGAATAAGAGCTCGCTGATCA
GCCTCGATAAGATACATTGATGAGTTTGGACAAACCACAACTAGAATGCAGTGAAAAAAATGCT
TTATTTGTGAAATTTGTGATGCTATTGCTTTATTTGTAACCATTATAAGCTGCAATAAACAAGT
TTTAATTAAGGTCGGGCAGGAAGAGGGCCTATTTCCCATGATTCCTTCATATTTGCATATACGA
TAGAAGGCTGTTAGAGAGATAATTAGAATTAATTTGACTGTAAACACAAAGATATTAGTAGAAA
ATACGTGACGTAGAAAGTAATAATTTCTTGGGTAGTTTGCAGTTTTAAAATTATGTTTTAAAAT
GGACTATCATATGCTTACCGTAACTTGAAAGTATTTCGATTTCTTGGCTTTATATATCTTGTGG
AAAGGACGAAACACCGAAGTAGCAGAGGAGAAGAGCTCGAAAGCTCTTCTCCTCTGCTACTTTT
TTTTAAGCTTTTTTGAATTCAGCTGACGTGCCTCGGACCGCTAGGAACCCCTAGTGATGGAGTT
GGCCACTCCCTCTCTGCGCGCTCGCTCGCTCACTGAGGCCGGGCGACCAAAGGTCGCCCGACGC
CCGGGCTTTGCCCGGGCGGCCTCAGTGAGCGAGCGAGCGCGCAG
Exemplary pITR.CMV.LucT2AGFP-U6shRNA-hKCNQ4-1593 sequence
(SEQ ID NO: 263)
CTGCGCGCTCGCTCGCTCACTGAGGCCGCCCGGGCGTCGGGCGACCTTTGGTCGCCCGGCCTCA
GTGAGCGAGCGAGCGCGCAGAGAGGGAGTGGCCAACTCCATCACTAGGGGTTCCTGCGGCCGCA
CGCGTCTAGATCCCATATATGGAGTTCCGCGTTACATAACTTACGGTAAATGGCCCGCCTGGCT
GACCGCCCAACGACCCCCGCCCATTGACGTCAATAATGACGTATGTTCCCATAGTAACGCCAAT
AGGGACTTTCCATTGACGTCAATGGGTGGAGTATTTACGGTAAACTGCCCACTTGGCAGTACAT
CAAGTGTATCATATGCCAAGTACGCCCCCTATTGACGTCAATGACGGTAAATGGCCCGCCTGGC
ATTATGCCCAGTACATGACCTTATGGGACTTTCCTACTTGGCAGTACATCTACGTATTAGTCAT
CGCTATTACCATGGTGATGCGGTTTTGGCAGTACATCAATGGGCGTGGATAGCGGTTTGACTCA
CGGGGATTTCCAAGTCTCCACCCCATTGACGTCAATGGGAGTTTGTTTTGGCACCAAAATCAAC
GGGACTTTCCAAAATGTCGTAACAACTCCGCCCCATTGACGCAAATGGGCGGTAGGCGTGTACG
GTGGGAGGTCTATATAAGCAGAGCTCGTTTAGTGAACCGTcagatcgcctggagacgcACCGGT
GCCACCATGGAAGATGCCAAAAACATTAAGAAGGGCCCAGCGCCATTCTACCCACTCGAAGACG
GGACCGCCGGCGAGCAGCTGCACAAAGCCATGAAGCGCTACGCCCTGGTGCCCGGCACCATCGC
CTTTACCGACGCACATATCGAGGTGGACATTACCTACGCCGAGTACTTCGAGATGAGCGTTCGG
CTGGCAGAAGCTATGAAGCGCTATGGGCTGAATACAAACCATCGGATCGTGGTGTGCAGCGAGA
ATAGCTTGCAGTTCTTCATGCCCGTGTTGGGTGCCCTGTTCATCGGTGTGGCTGTGGCCCCAGC
TAACGACATCTACAACGAGCGCGAGCTGCTGAACAGCATGGGCATCAGCCAGCCCACCGTCGTA
TTCGTGAGCAAGAAAGGGCTGCAAAAGATCCTCAACGTGCAAAAGAAGCTACCGATCATACAAA
AGATCATCATCATGGATAGCAAGACCGACTACCAGGGCTTCCAAAGCATGTACACCTTCGTGAC
TTCCCATTTGCCACCCGGCTTCAACGAGTACGACTTCGTGCCCGAGAGCTTCGACCGGGACAAA
ACCATCGCCCTGATCATGAACAGTAGTGGCAGTACCGGATTGCCCAAGGGCGTAGCCCTACCGC
ACCGCACCGCTTGTGTCCGATTCAGTCATGCCCGCGACCCCATCTTCGGCAACCAGATCATCCC
CGACACCGCTATCCTCAGCGTGGTGCCATTTCACCACGGCTTCGGCATGTTCACCACGCTGGGC
TACTTGATCTGCGGCTTTCGGGTCGTGCTCATGTACCGCTTCGAGGAGGAGCTATTCTTGCGCA
GCTTGCAAGACTATAAGATTCAATCTGCCCTGCTGGTGCCCACACTATTTAGCTTCTTCGCTAA
GAGCACTCTCATCGACAAGTACGACCTAAGCAACTTGCACGAGATCGCCAGCGGCGGGGCGCCG
CTCAGCAAGGAGGTAGGTGAGGCCGTGGCCAAACGCTTCCACCTACCAGGCATCCGCCAGGGCT
ACGGCCTGACAGAAACAACCAGCGCCATTCTGATCACCCCCGAAGGGGACGACAAGCCTGGCGC
AGTAGGCAAGGTGGTGCCCTTCTTCGAGGCTAAGGTGGTGGACTTGGACACAGGTAAGACACTG
GGTGTGAACCAGCGCGGCGAGCTGTGCGTCCGTGGCCCCATGATCATGAGCGGCTACGTTAACA
ACCCCGAGGCTACAAACGCTCTCATCGACAAGGACGGCTGGCTGCACAGCGGCGACATCGCCTA
CTGGGACGAGGACGAGCACTTCTTCATCGTGGACCGGCTGAAGAGCCTGATCAAATACAAGGGC
TACCAGGTAGCCCCAGCCGAACTGGAGAGCATCCTGCTGCAACACCCCAACATCTTCGACGCCG
GGGTCGCCGGCCTGCCCGACGACGATGCCGGCGAGCTGCCCGCCGCAGTCGTCGTGCTGGAACA
CGGTAAAACCATGACCGAGAAGGAGATCGTGGACTATGTGGCCAGCCAGGTTACAACCGCCAAG
AAGCTGCGCGGTGGTGTTGTGTTCGTGGACGAGGTGCCTAAAGGACTGACCGGCAAGTTGGACG
CCCGCAAGATCCGCGAGATTCTCATTAAGGCCAAGAAGGGCGGCAAGATCGCCGTGGGCTCCGG
AGAGGGCAGAGGAAGTCTGCTAACATGCGGTGACGTCGAGGAGAATCCTGGCCCAATGGAGAGC
GACGAGAGCGGCCTGCCCGCCATGGAGATCGAGTGCCGCATCACCGGCACCCTGAACGGCGTGG
AGTTCGAGCTGGTGGGCGGCGGAGAGGGCACCCCCGAGCAGGGCCGCATGACCAACAAGATGAA
GAGCACCAAAGGCGCCCTGACCTTCAGCCCCTACCTGCTGAGCCACGTGATGGGCTACGGCTTC
TACCACTTCGGCACCTACCCCAGCGGCTACGAGAACCCCTTCCTGCACGCCATCAACAACGGCG
GCTACACCAACACCCGCATCGAGAAGTACGAGGACGGCGGCGTGCTGCACGTGAGCTTCAGCTA
CCGCTACGAGGCCGGCCGCGTGATCGGCGACTTCAAGGTGATGGGCACCGGCTTCCCCGAGGAC
AGCGTGATCTTCACCGACAAGATCATCCGCAGCAACGCCACCGTGGAGCACCTGCACCCCATGG
GCGATAACGATCTGGATGGCAGCTTCACCCGCACCTTCAGCCTGCGCGACGGCGGCTACTACAG
CTCCGTGGTGGACAGCCACATGCACTTCAAGAGCGCCATCCACCCCAGCATCCTGCAGAACGGG
GGCCCCATGTTCGCCTTCCGCCGCGTGGAGGAGGATCACAGCAACACCGAGCTGGGCATCGTGG
AGTACCAGCACGCCTTCAAGACCCCGGATGCAGATGCCGGTGAAGAATAAGAGCTCGCTGATCA
GCCTCGATAAGATACATTGATGAGTTTGGACAAACCACAACTAGAATGCAGTGAAAAAAATGCT
TTATTTGTGAAATTTGTGATGCTATTGCTTTATTTGTAACCATTATAAGCTGCAATAAACAAGT
TTTAATTAAGGTCGGGCAGGAAGAGGGCCTATTTCCCATGATTCCTTCATATTTGCATATACGA
TAGAAGGCTGTTAGAGAGATAATTAGAATTAATTTGACTGTAAACACAAAGATATTAGTAGAAA
ATACGTGACGTAGAAAGTAATAATTTCTTGGGTAGTTTGCAGTTTTAAAATTATGTTTTAAAAT
GGACTATCATATGCTTACCGTAACTTGAAAGTATTTCGATTTCTTGGCTTTATATATCTTGTGG
AAAGGACGAAACACCGAAGACAGTCATCCGCTCCATCCGAAGATGGAGCGGATGACTGTCTTTT
TTTTAAGCTTTTTTGAATTCAGCTGACGTGCCTCGGACCGCTAGGAACCCCTAGTGATGGAGTT
GGCCACTCCCTCTCTGCGCGCTCGCTCGCTCACTGAGGCCGGGCGACCAAAGGTCGCCCGACGC
CCGGGCTTTGCCCGGGCGGCCTCAGTGAGCGAGCGAGCGCGCA
Exemplary pITR.CMV.LucT2AGFP-U6shRNA-hKCNQ4-1677 sequence
(SEQ ID NO: 264)
CTGCGCGCTCGCTCGCTCACTGAGGCCGCCCGGGCGTCGGGCGACCTTTGGTCGCCCGGCCTCA
GTGAGCGAGCGAGCGCGCAGAGAGGGAGTGGCCAACTCCATCACTAGGGGTTCCTGCGGCCGCA
CGCGTCTAGATCCCATATATGGAGTTCCGCGTTACATAACTTACGGTAAATGGCCCGCCTGGCT
GACCGCCCAACGACCCCCGCCCATTGACGTCAATAATGACGTATGTTCCCATAGTAACGCCAAT
AGGGACTTTCCATTGACGTCAATGGGTGGAGTATTTACGGTAAACTGCCCACTTGGCAGTACAT
CAAGTGTATCATATGCCAAGTACGCCCCCTATTGACGTCAATGACGGTAAATGGCCCGCCTGGC
ATTATGCCCAGTACATGACCTTATGGGACTTTCCTACTTGGCAGTACATCTACGTATTAGTCAT
CGCTATTACCATGGTGATGCGGTTTTGGCAGTACATCAATGGGCGTGGATAGCGGTTTGACTCA
CGGGGATTTCCAAGTCTCCACCCCATTGACGTCAATGGGAGTTTGTTTTGGCACCAAAATCAAC
GGGACTTTCCAAAATGTCGTAACAACTCCGCCCCATTGACGCAAATGGGCGGTAGGCGTGTACG
GTGGGAGGTCTATATAAGCAGAGCTCGTTTAGTGAACCGTcagatcgcctggagacgcACCGGT
GCCACCATGGAAGATGCCAAAAACATTAAGAAGGGCCCAGCGCCATTCTACCCACTCGAAGACG
GGACCGCCGGCGAGCAGCTGCACAAAGCCATGAAGCGCTACGCCCTGGTGCCCGGCACCATCGC
CTTTACCGACGCACATATCGAGGTGGACATTACCTACGCCGAGTACTTCGAGATGAGCGTTCGG
CTGGCAGAAGCTATGAAGCGCTATGGGCTGAATACAAACCATCGGATCGTGGTGTGCAGCGAGA
ATAGCTTGCAGTTCTTCATGCCCGTGTTGGGTGCCCTGTTCATCGGTGTGGCTGTGGCCCCAGC
TAACGACATCTACAACGAGCGCGAGCTGCTGAACAGCATGGGCATCAGCCAGCCCACCGTCGTA
TTCGTGAGCAAGAAAGGGCTGCAAAAGATCCTCAACGTGCAAAAGAAGCTACCGATCATACAAA
AGATCATCATCATGGATAGCAAGACCGACTACCAGGGCTTCCAAAGCATGTACACCTTCGTGAC
TTCCCATTTGCCACCCGGCTTCAACGAGTACGACTTCGTGCCCGAGAGCTTCGACCGGGACAAA
ACCATCGCCCTGATCATGAACAGTAGTGGCAGTACCGGATTGCCCAAGGGCGTAGCCCTACCGC
ACCGCACCGCTTGTGTCCGATTCAGTCATGCCCGCGACCCCATCTTCGGCAACCAGATCATCCC
CGACACCGCTATCCTCAGCGTGGTGCCATTTCACCACGGCTTCGGCATGTTCACCACGCTGGGC
TACTTGATCTGCGGCTTTCGGGTCGTGCTCATGTACCGCTTCGAGGAGGAGCTATTCTTGCGCA
GCTTGCAAGACTATAAGATTCAATCTGCCCTGCTGGTGCCCACACTATTTAGCTTCTTCGCTAA
GAGCACTCTCATCGACAAGTACGACCTAAGCAACTTGCACGAGATCGCCAGCGGCGGGGCGCCG
CTCAGCAAGGAGGTAGGTGAGGCCGTGGCCAAACGCTTCCACCTACCAGGCATCCGCCAGGGCT
ACGGCCTGACAGAAACAACCAGCGCCATTCTGATCACCCCCGAAGGGGACGACAAGCCTGGCGC
AGTAGGCAAGGTGGTGCCCTTCTTCGAGGCTAAGGTGGTGGACTTGGACACAGGTAAGACACTG
GGTGTGAACCAGCGCGGCGAGCTGTGCGTCCGTGGCCCCATGATCATGAGCGGCTACGTTAACA
ACCCCGAGGCTACAAACGCTCTCATCGACAAGGACGGCTGGCTGCACAGCGGCGACATCGCCTA
CTGGGACGAGGACGAGCACTTCTTCATCGTGGACCGGCTGAAGAGCCTGATCAAATACAAGGGC
TACCAGGTAGCCCCAGCCGAACTGGAGAGCATCCTGCTGCAACACCCCAACATCTTCGACGCCG
GGGTCGCCGGCCTGCCCGACGACGATGCCGGCGAGCTGCCCGCCGCAGTCGTCGTGCTGGAACA
CGGTAAAACCATGACCGAGAAGGAGATCGTGGACTATGTGGCCAGCCAGGTTACAACCGCCAAG
AAGCTGCGCGGTGGTGTTGTGTTCGTGGACGAGGTGCCTAAAGGACTGACCGGCAAGTTGGACG
CCCGCAAGATCCGCGAGATTCTCATTAAGGCCAAGAAGGGCGGCAAGATCGCCGTGGGCTCCGG
AGAGGGCAGAGGAAGTCTGCTAACATGCGGTGACGTCGAGGAGAATCCTGGCCCAATGGAGAGC
GACGAGAGCGGCCTGCCCGCCATGGAGATCGAGTGCCGCATCACCGGCACCCTGAACGGCGTGG
AGTTCGAGCTGGTGGGCGGCGGAGAGGGCACCCCCGAGCAGGGCCGCATGACCAACAAGATGAA
GAGCACCAAAGGCGCCCTGACCTTCAGCCCCTACCTGCTGAGCCACGTGATGGGCTACGGCTTC
TACCACTTCGGCACCTACCCCAGCGGCTACGAGAACCCCTTCCTGCACGCCATCAACAACGGCG
GCTACACCAACACCCGCATCGAGAAGTACGAGGACGGCGGCGTGCTGCACGTGAGCTTCAGCTA
CCGCTACGAGGCCGGCCGCGTGATCGGCGACTTCAAGGTGATGGGCACCGGCTTCCCCGAGGAC
AGCGTGATCTTCACCGACAAGATCATCCGCAGCAACGCCACCGTGGAGCACCTGCACCCCATGG
GCGATAACGATCTGGATGGCAGCTTCACCCGCACCTTCAGCCTGCGCGACGGCGGCTACTACAG
CTCCGTGGTGGACAGCCACATGCACTTCAAGAGCGCCATCCACCCCAGCATCCTGCAGAACGGG
GGCCCCATGTTCGCCTTCCGCCGCGTGGAGGAGGATCACAGCAACACCGAGCTGGGCATCGTGG
AGTACCAGCACGCCTTCAAGACCCCGGATGCAGATGCCGGTGAAGAATAAGAGCTCGCTGATCA
GCCTCGATAAGATACATTGATGAGTTTGGACAAACCACAACTAGAATGCAGTGAAAAAAATGCT
TTATTTGTGAAATTTGTGATGCTATTGCTTTATTTGTAACCATTATAAGCTGCAATAAACAAGT
TTTAATTAAGGTCGGGCAGGAAGAGGGCCTATTTCCCATGATTCCTTCATATTTGCATATACGA
TAGAAGGCTGTTAGAGAGATAATTAGAATTAATTTGACTGTAAACACAAAGATATTAGTAGAAA
ATACGTGACGTAGAAAGTAATAATTTCTTGGGTAGTTTGCAGTTTTAAAATTATGTTTTAAAAT
GGACTATCATATGCTTACCGTAACTTGAAAGTATTTCGATTTCTTGGCTTTATATATCTTGTGG
AAAGGACGAAACACCGAAGGACGTCATTGAGCAGTACCGAAGTACTGCTCAATGACGTCCTTTT
TTTTAAGCTTTTTTGAATTCAGCTGACGTGCCTCGGACCGCTAGGAACCCCTAGTGATGGAGTT
GGCCACTCCCTCTCTGCGCGCTCGCTCGCTCACTGAGGCCGGGCGACCAAAGGTCGCCCGACGC
CCGGGCTTTGCCCGGGCGGCCTCAGTGAGCGAGCGAGCGCGCAG
Exemplary pITR.CMV.LucT2AGFP-U6shRNA-hKCNQ4-1721 sequence
(SEQ ID NO: 265)
CTGCGCGCTCGCTCGCTCACTGAGGCCGCCCGGGCGTCGGGCGACCTTTGGTCGCCCGGCCTCA
GTGAGCGAGCGAGCGCGCAGAGAGGGAGTGGCCAACTCCATCACTAGGGGTTCCTGCGGCCGCA
CGCGTCTAGATCCCATATATGGAGTTCCGCGTTACATAACTTACGGTAAATGGCCCGCCTGGCT
GACCGCCCAACGACCCCCGCCCATTGACGTCAATAATGACGTATGTTCCCATAGTAACGCCAAT
AGGGACTTTCCATTGACGTCAATGGGTGGAGTATTTACGGTAAACTGCCCACTTGGCAGTACAT
CAAGTGTATCATATGCCAAGTACGCCCCCTATTGACGTCAATGACGGTAAATGGCCCGCCTGGC
ATTATGCCCAGTACATGACCTTATGGGACTTTCCTACTTGGCAGTACATCTACGTATTAGTCAT
CGCTATTACCATGGTGATGCGGTTTTGGCAGTACATCAATGGGCGTGGATAGCGGTTTGACTCA
CGGGGATTTCCAAGTCTCCACCCCATTGACGTCAATGGGAGTTTGTTTTGGCACCAAAATCAAC
GGGACTTTCCAAAATGTCGTAACAACTCCGCCCCATTGACGCAAATGGGCGGTAGGCGTGTACG
GTGGGAGGTCTATATAAGCAGAGCTCGTTTAGTGAACCGTcagatcgcctggagacgcACCGGT
GCCACCATGGAAGATGCCAAAAACATTAAGAAGGGCCCAGCGCCATTCTACCCACTCGAAGACG
GGACCGCCGGCGAGCAGCTGCACAAAGCCATGAAGCGCTACGCCCTGGTGCCCGGCACCATCGC
CTTTACCGACGCACATATCGAGGTGGACATTACCTACGCCGAGTACTTCGAGATGAGCGTTCGG
CTGGCAGAAGCTATGAAGCGCTATGGGCTGAATACAAACCATCGGATCGTGGTGTGCAGCGAGA
ATAGCTTGCAGTTCTTCATGCCCGTGTTGGGTGCCCTGTTCATCGGTGTGGCTGTGGCCCCAGC
TAACGACATCTACAACGAGCGCGAGCTGCTGAACAGCATGGGCATCAGCCAGCCCACCGTCGTA
TTCGTGAGCAAGAAAGGGCTGCAAAAGATCCTCAACGTGCAAAAGAAGCTACCGATCATACAAA
AGATCATCATCATGGATAGCAAGACCGACTACCAGGGCTTCCAAAGCATGTACACCTTCGTGAC
TTCCCATTTGCCACCCGGCTTCAACGAGTACGACTTCGTGCCCGAGAGCTTCGACCGGGACAAA
ACCATCGCCCTGATCATGAACAGTAGTGGCAGTACCGGATTGCCCAAGGGCGTAGCCCTACCGC
ACCGCACCGCTTGTGTCCGATTCAGTCATGCCCGCGACCCCATCTTCGGCAACCAGATCATCCC
CGACACCGCTATCCTCAGCGTGGTGCCATTTCACCACGGCTTCGGCATGTTCACCACGCTGGGC
TACTTGATCTGCGGCTTTCGGGTCGTGCTCATGTACCGCTTCGAGGAGGAGCTATTCTTGCGCA
GCTTGCAAGACTATAAGATTCAATCTGCCCTGCTGGTGCCCACACTATTTAGCTTCTTCGCTAA
GAGCACTCTCATCGACAAGTACGACCTAAGCAACTTGCACGAGATCGCCAGCGGCGGGGCGCCG
CTCAGCAAGGAGGTAGGTGAGGCCGTGGCCAAACGCTTCCACCTACCAGGCATCCGCCAGGGCT
ACGGCCTGACAGAAACAACCAGCGCCATTCTGATCACCCCCGAAGGGGACGACAAGCCTGGCGC
AGTAGGCAAGGTGGTGCCCTTCTTCGAGGCTAAGGTGGTGGACTTGGACACAGGTAAGACACTG
GGTGTGAACCAGCGCGGCGAGCTGTGCGTCCGTGGCCCCATGATCATGAGCGGCTACGTTAACA
ACCCCGAGGCTACAAACGCTCTCATCGACAAGGACGGCTGGCTGCACAGCGGCGACATCGCCTA
CTGGGACGAGGACGAGCACTTCTTCATCGTGGACCGGCTGAAGAGCCTGATCAAATACAAGGGC
TACCAGGTAGCCCCAGCCGAACTGGAGAGCATCCTGCTGCAACACCCCAACATCTTCGACGCCG
GGGTCGCCGGCCTGCCCGACGACGATGCCGGCGAGCTGCCCGCCGCAGTCGTCGTGCTGGAACA
CGGTAAAACCATGACCGAGAAGGAGATCGTGGACTATGTGGCCAGCCAGGTTACAACCGCCAAG
AAGCTGCGCGGTGGTGTTGTGTTCGTGGACGAGGTGCCTAAAGGACTGACCGGCAAGTTGGACG
CCCGCAAGATCCGCGAGATTCTCATTAAGGCCAAGAAGGGCGGCAAGATCGCCGTGGGCTCCGG
AGAGGGCAGAGGAAGTCTGCTAACATGCGGTGACGTCGAGGAGAATCCTGGCCCAATGGAGAGC
GACGAGAGCGGCCTGCCCGCCATGGAGATCGAGTGCCGCATCACCGGCACCCTGAACGGCGTGG
AGTTCGAGCTGGTGGGCGGCGGAGAGGGCACCCCCGAGCAGGGCCGCATGACCAACAAGATGAA
GAGCACCAAAGGCGCCCTGACCTTCAGCCCCTACCTGCTGAGCCACGTGATGGGCTACGGCTTC
TACCACTTCGGCACCTACCCCAGCGGCTACGAGAACCCCTTCCTGCACGCCATCAACAACGGCG
GCTACACCAACACCCGCATCGAGAAGTACGAGGACGGCGGCGTGCTGCACGTGAGCTTCAGCTA
CCGCTACGAGGCCGGCCGCGTGATCGGCGACTTCAAGGTGATGGGCACCGGCTTCCCCGAGGAC
AGCGTGATCTTCACCGACAAGATCATCCGCAGCAACGCCACCGTGGAGCACCTGCACCCCATGG
GCGATAACGATCTGGATGGCAGCTTCACCCGCACCTTCAGCCTGCGCGACGGCGGCTACTACAG
CTCCGTGGTGGACAGCCACATGCACTTCAAGAGCGCCATCCACCCCAGCATCCTGCAGAACGGG
GGCCCCATGTTCGCCTTCCGCCGCGTGGAGGAGGATCACAGCAACACCGAGCTGGGCATCGTGG
AGTACCAGCACGCCTTCAAGACCCCGGATGCAGATGCCGGTGAAGAATAAGAGCTCGCTGATCA
GCCTCGATAAGATACATTGATGAGTTTGGACAAACCACAACTAGAATGCAGTGAAAAAAATGCT
TTATTTGTGAAATTTGTGATGCTATTGCTTTATTTGTAACCATTATAAGCTGCAATAAACAAGT
TTTAATTAAGGTCGGGCAGGAAGAGGGCCTATTTCCCATGATTCCTTCATATTTGCATATACGA
TAGAAGGCTGTTAGAGAGATAATTAGAATTAATTTGACTGTAAACACAAAGATATTAGTAGAAA
ATACGTGACGTAGAAAGTAATAATTTCTTGGGTAGTTTGCAGTTTTAAAATTATGTTTTAAAAT
GGACTATCATATGCTTACCGTAACTTGAAAGTATTTCGATTTCTTGGCTTTATATATCTTGTGG
AAAGGACGAAACACCGGCCGGATCAAGAGCCTGCAAACGAATTTGCAGGCTCTTGATCCGGCTT
TTTTAAGCTTTTTTGAATTCAGCTGACGTGCCTCGGACCGCTAGGAACCCCTAGTGATGGAGTT
GGCCACTCCCTCTCTGCGCGCTCGCTCGCTCACTGAGGCCGGGCGACCAAAGGTCGCCCGACGC
CCGGGCTTTGCCCGGGCGGCCTCAGTGAGCGAGCGAGCGCGCAG
Exemplary pITR.CMV.LucT2AGFP-U6shRNA-hKCNQ4-1827 sequence
(SEQ ID NO: 266)
CTGCGCGCTCGCTCGCTCACTGAGGCCGCCCGGGCGTCGGGCGACCTTTGGTCGCCCGGCCTCA
GTGAGCGAGCGAGCGCGCAGAGAGGGAGTGGCCAACTCCATCACTAGGGGTTCCTGCGGCCGCA
CGCGTCTAGATCCCATATATGGAGTTCCGCGTTACATAACTTACGGTAAATGGCCCGCCTGGCT
GACCGCCCAACGACCCCCGCCCATTGACGTCAATAATGACGTATGTTCCCATAGTAACGCCAAT
AGGGACTTTCCATTGACGTCAATGGGTGGAGTATTTACGGTAAACTGCCCACTTGGCAGTACAT
CAAGTGTATCATATGCCAAGTACGCCCCCTATTGACGTCAATGACGGTAAATGGCCCGCCTGGC
ATTATGCCCAGTACATGACCTTATGGGACTTTCCTACTTGGCAGTACATCTACGTATTAGTCAT
CGCTATTACCATGGTGATGCGGTTTTGGCAGTACATCAATGGGCGTGGATAGCGGTTTGACTCA
CGGGGATTTCCAAGTCTCCACCCCATTGACGTCAATGGGAGTTTGTTTTGGCACCAAAATCAAC
GGGACTTTCCAAAATGTCGTAACAACTCCGCCCCATTGACGCAAATGGGCGGTAGGCGTGTACG
GTGGGAGGTCTATATAAGCAGAGCTCGTTTAGTGAACCGTcagatcgcctggagacgcACCGGT
GCCACCATGGAAGATGCCAAAAACATTAAGAAGGGCCCAGCGCCATTCTACCCACTCGAAGACG
GGACCGCCGGCGAGCAGCTGCACAAAGCCATGAAGCGCTACGCCCTGGTGCCCGGCACCATCGC
CTTTACCGACGCACATATCGAGGTGGACATTACCTACGCCGAGTACTTCGAGATGAGCGTTCGG
CTGGCAGAAGCTATGAAGCGCTATGGGCTGAATACAAACCATCGGATCGTGGTGTGCAGCGAGA
ATAGCTTGCAGTTCTTCATGCCCGTGTTGGGTGCCCTGTTCATCGGTGTGGCTGTGGCCCCAGC
TAACGACATCTACAACGAGCGCGAGCTGCTGAACAGCATGGGCATCAGCCAGCCCACCGTCGTA
TTCGTGAGCAAGAAAGGGCTGCAAAAGATCCTCAACGTGCAAAAGAAGCTACCGATCATACAAA
AGATCATCATCATGGATAGCAAGACCGACTACCAGGGCTTCCAAAGCATGTACACCTTCGTGAC
TTCCCATTTGCCACCCGGCTTCAACGAGTACGACTTCGTGCCCGAGAGCTTCGACCGGGACAAA
ACCATCGCCCTGATCATGAACAGTAGTGGCAGTACCGGATTGCCCAAGGGCGTAGCCCTACCGC
ACCGCACCGCTTGTGTCCGATTCAGTCATGCCCGCGACCCCATCTTCGGCAACCAGATCATCCC
CGACACCGCTATCCTCAGCGTGGTGCCATTTCACCACGGCTTCGGCATGTTCACCACGCTGGGC
TACTTGATCTGCGGCTTTCGGGTCGTGCTCATGTACCGCTTCGAGGAGGAGCTATTCTTGCGCA
GCTTGCAAGACTATAAGATTCAATCTGCCCTGCTGGTGCCCACACTATTTAGCTTCTTCGCTAA
GAGCACTCTCATCGACAAGTACGACCTAAGCAACTTGCACGAGATCGCCAGCGGCGGGGCGCCG
CTCAGCAAGGAGGTAGGTGAGGCCGTGGCCAAACGCTTCCACCTACCAGGCATCCGCCAGGGCT
ACGGCCTGACAGAAACAACCAGCGCCATTCTGATCACCCCCGAAGGGGACGACAAGCCTGGCGC
AGTAGGCAAGGTGGTGCCCTTCTTCGAGGCTAAGGTGGTGGACTTGGACACAGGTAAGACACTG
GGTGTGAACCAGCGCGGCGAGCTGTGCGTCCGTGGCCCCATGATCATGAGCGGCTACGTTAACA
ACCCCGAGGCTACAAACGCTCTCATCGACAAGGACGGCTGGCTGCACAGCGGCGACATCGCCTA
CTGGGACGAGGACGAGCACTTCTTCATCGTGGACCGGCTGAAGAGCCTGATCAAATACAAGGGC
TACCAGGTAGCCCCAGCCGAACTGGAGAGCATCCTGCTGCAACACCCCAACATCTTCGACGCCG
GGGTCGCCGGCCTGCCCGACGACGATGCCGGCGAGCTGCCCGCCGCAGTCGTCGTGCTGGAACA
CGGTAAAACCATGACCGAGAAGGAGATCGTGGACTATGTGGCCAGCCAGGTTACAACCGCCAAG
AAGCTGCGCGGTGGTGTTGTGTTCGTGGACGAGGTGCCTAAAGGACTGACCGGCAAGTTGGACG
CCCGCAAGATCCGCGAGATTCTCATTAAGGCCAAGAAGGGCGGCAAGATCGCCGTGGGCTCCGG
AGAGGGCAGAGGAAGTCTGCTAACATGCGGTGACGTCGAGGAGAATCCTGGCCCAATGGAGAGC
GACGAGAGCGGCCTGCCCGCCATGGAGATCGAGTGCCGCATCACCGGCACCCTGAACGGCGTGG
AGTTCGAGCTGGTGGGCGGCGGAGAGGGCACCCCCGAGCAGGGCCGCATGACCAACAAGATGAA
GAGCACCAAAGGCGCCCTGACCTTCAGCCCCTACCTGCTGAGCCACGTGATGGGCTACGGCTTC
TACCACTTCGGCACCTACCCCAGCGGCTACGAGAACCCCTTCCTGCACGCCATCAACAACGGCG
GCTACACCAACACCCGCATCGAGAAGTACGAGGACGGCGGCGTGCTGCACGTGAGCTTCAGCTA
CCGCTACGAGGCCGGCCGCGTGATCGGCGACTTCAAGGTGATGGGCACCGGCTTCCCCGAGGAC
AGCGTGATCTTCACCGACAAGATCATCCGCAGCAACGCCACCGTGGAGCACCTGCACCCCATGG
GCGATAACGATCTGGATGGCAGCTTCACCCGCACCTTCAGCCTGCGCGACGGCGGCTACTACAG
CTCCGTGGTGGACAGCCACATGCACTTCAAGAGCGCCATCCACCCCAGCATCCTGCAGAACGGG
GGCCCCATGTTCGCCTTCCGCCGCGTGGAGGAGGATCACAGCAACACCGAGCTGGGCATCGTGG
AGTACCAGCACGCCTTCAAGACCCCGGATGCAGATGCCGGTGAAGAATAAGAGCTCGCTGATCA
GCCTCGATAAGATACATTGATGAGTTTGGACAAACCACAACTAGAATGCAGTGAAAAAAATGCT
TTATTTGTGAAATTTGTGATGCTATTGCTTTATTTGTAACCATTATAAGCTGCAATAAACAAGT
TTTAATTAAGGTCGGGCAGGAAGAGGGCCTATTTCCCATGATTCCTTCATATTTGCATATACGA
TAGAAGGCTGTTAGAGAGATAATTAGAATTAATTTGACTGTAAACACAAAGATATTAGTAGAAA
ATACGTGACGTAGAAAGTAATAATTTCTTGGGTAGTTTGCAGTTTTAAAATTATGTTTTAAAAT
GGACTATCATATGCTTACCGTAACTTGAAAGTATTTCGATTTCTTGGCTTTATATATCTTGTGG
AAAGGACGAAACACCGGGTGGATGAAATCAGCATGATCGAAATCATGCTGATTTCATCCACCTT
TTTTAAGCTTTTTTGAATTCAGCTGACGTGCCTCGGACCGCTAGGAACCCCTAGTGATGGAGTT
GGCCACTCCCTCTCTGCGCGCTCGCTCGCTCACTGAGGCCGGGCGACCAAAGGTCGCCCGACGC
CCGGGCTTTGCCCGGGCGGCCTCAGTGAGCGAGCGAGCGCGCAG

[0372] Exemplary hKCNQ4 codon optimized to resist CRISPR, some with sgRNA Construct Sequences

Exemplary pITR.CMV.hKCNQ4codop.mScarlet
sequence
(SEQ ID NO: 267)
CTGCGCGCTCGCTCGCTCACTGAGGCCGCCCGGGCGTCGGGCGACCT
TTGGTCGCCCGGCCTCAGTGAGCGAGCGAGCGCGCAGAGAGGGAGTG
GCCAACTCCATCACTAGGGGTTCCTGCGGCCGCACGCGTCTAGATCC
CATATATGGAGTTCCGCGTTACATAACTTACGGTAAATGGCCCGCCT
GGCTGACCGCCCAACGACCCCCGCCCATTGACGTCAATAATGACGTA
TGTTCCCATAGTAACGCCAATAGGGACTTTCCATTGACGTCAATGGG
TGGAGTATTTACGGTAAACTGCCCACTTGGCAGTACATCAAGTGTAT
CATATGCCAAGTACGCCCCCTATTGACGTCAATGACGGTAAATGGCC
CGCCTGGCATTATGCCCAGTACATGACCTTATGGGACTTTCCTACTT
GGCAGTACATCTACGTATTAGTCATCGCTATTACCATGGTGATGCGG
TTTTGGCAGTACATCAATGGGCGTGGATAGCGGTTTGACTCACGGGG
ATTTCCAAGTCTCCACCCCATTGACGTCAATGGGAGTTTGTTTTGGC
ACCAAAATCAACGGGACTTTCCAAAATGTCGTAACAACTCCGCCCCA
TTGACGCAAATGGGCGGTAGGCGTGTACGGTGGGAGGTCTATATAAG
CAGAGCTCGTTTAGTGAACCGTCAGATCGCCTGGAGACGCACCGGTG
CCACCATGGCTGAAGCCCCTCCTAGAAGGCTTGGACTGGGACCTCCT
CCTGGGGATGCTCCTAGAGCTGAACTGGTGGCTCTGACAGCCGTGCA
GTCTGAACAAGGCGAAGCTGGTGGCGGCGGATCTCCACGTAGACTTG
GACTGCTGGGAAGCCCTCTTCCTCCTGGTGCTCCACTTCCTGGACCT
GGCAGTGGATCTGGATCTGCCTGTGGCCAGAGAAGCTCTGCCGCTCA
CAAGAGATACCGGCGGCTGCAGAACTGGGTGTACAACGTGCTGGAAA
GACCCAGAGGCTGGGCCTTCGTGTACCACGTGTTCATCTTTCTGCTG
GTGTTCAGCTGCCTGGTGCTGTCCGTGCTGAGCACCATCCAAGAACA
TCAAGAGCTGGCTAACGAGTGCCTGTTAATACTGGAGTTTGTGATGA
TTGTGGTGTTCGGCCTCGAGTACATCGTCCGCGTTTGGAGCGCCGGC
TGCTGCTGCAGATATAGAGGTTGGCAAGGCAGATTCCGCTTCGCCAG
AAAGCCCTTCTGCGTGATCGACTTCATCGTGTTCGTGGCCAGCGTGG
CCGTGATTGCTGCTGGCACACAGGGCAACATCTTCGCCACAAGCGCC
CTGCGGAGCATGCGGTTTCTGCAGATCCTGAGAATGGTCCGAATGGA
CAGAAGAGGCGGCACCTGGAAGCTGCTGGGCTCTGTGGTGTACGCCC
ACAGCAAAGAGCTGATCACCGCCTGGTACATCGGATTTCTGGTGCTG
ATCTTCGCCTCCTTCCTGGTGTACCTGGCCGAGAAGGACGCCAACAG
CGACTTTAGCAGCTACGCCGACTCTCTTTGGTGGGGCACCATCACAC
TGACCACCATCGGCTACGGCGACAAGACCCCTCACACATGGCTGGGA
AGAGTGCTGGCCGCTGGATTTGCTCTGCTGGGCATCAGCTTTTTCGC
CCTGCCTGCCGGAATCCTCGGATCTGGCTTTGCCCTGAAGGTGCAAG
AGCAGCACCGGCAGAAGCACTTCGAGAAGAGAAGAATGCCTGCCGCC
AACCTGATTCAGGCCGCTTGGAGACTGTACAGCACCGACATGAGCAG
AGCCTACCTGACCGCCACGTGGTATTATTACGACTCGATCCTGCCTA
GCTTCCGCGAACTGGCCCTGCTGTTTGAGCATGTGCAGAGAGCCAGA
AACGGCGGCCTCAGACCTCTGGAAGTTCGGAGAGCACCTGTGCCTGA
TGGCGCCCCTTCTAGATATCCTCCAGTGGCCACCTGTCACAGACCCG
GCAGCACATCTTTTTGCCCTGGCGAGTCTAGCCGGATGGGCATCAAG
GACAGAATCAGAATGGGCAGCAGCCAGCGGAGAACAGGCCCTTCTAA
ACAGCATCTGGCCCCTCCAACCATGCCTACAAGCCCTAGCTCTGAGC
AAGTGGGCGAAGCCACCTCTCCTACCAAGGTGCAGAAGTCCTGGTCC
TTCAACGACCGGACCAGATTCAGAGCCAGCCTGAGACTGAAGCCCAG
AACCTCTGCCGAGGATGCCCCTTCTGAAGAGGTGGCCGAAGAGAAGT
CCTACCAGTGCGAGCTGACCGTGGACGACATCATGCCAGCCGTGAAA
ACCGTGATACGGTCTATCCGGATCCTGAAGTTCCTGGTGGCCAAGCG
GAAGTTCAAAGAGACACTGCGGCCCTACGACGTGAAGGACGTGATCG
AGCAGTATTCTGCCGGCCACCTGGACATGCTGGGCAGAATCAAGAGC
CTGCAGACCAGAGTGGACCAGATCGTTGGAAGAGGCCCAGGCGACAG
AAAGGCCAGAGAGAAGGGCGATAAGGGCCCATCTGATGCCGAGGTTG
TCGACGAGATATCAATGATGGGCAGAGTGGTCAAGGTGGAAAAACAG
GTGCAGAGCATCGAGCACAAGCTGGACCTGCTGCTGGGATTCTACAG
CCGGTGTCTGAGAAGCGGCACATCTGCATCTCTGGGCGCTGTGCAGG
TCCCACTGTTCGACCCTGATATCACCAGCGACTATCACAGCCCCGTG
GACCACGAGGACATCTCCGTTTCTGCTCAGACCCTGAGCATCAGCAG
ATCCGTGTCCACCAACATGGACGGATCCCGGGCTGACTACAAAGACC
ATGACGGTGATTATAAAGATCATGACATCGACTACAAGGATGACGAT
GACAAGGGCTCCGGAGAGGGCAGAGGAAGTCTGCTAACATGCGGTGA
CGTCGAGGAGAATCCTGGCCCAATGGTGAGCAAGGGCGAGGCAGTGA
TCAAGGAGTTCATGCGGTTCAAGGTGCACATGGAGGGCTCCATGAAC
GGCCACGAGTTCGAGATCGAGGGCGAGGGCGAGGGCCGCCCCTACGA
GGGCACCCAGACCGCCAAGCTGAAGGTGACCAAGGGTGGCCCCCTGC
CCTTCTCCTGGGACATCCTGTCCCCTCAGTTCATGTACGGCTCCAGG
GCCTTCATCAAGCACCCCGCCGACATCCCCGACTACTATAAGCAGTC
CTTCCCCGAGGGCTTCAAGTGGGAGCGCGTGATGAACTTCGAGGACG
GCGGCGCCGTGACCGTGACCCAGGACACCTCCCTGGAGGACGGCACC
CTGATCTACAAGGTGAAGCTCCGCGGCACCAACTTCCCTCCTGACGG
CCCCGTAATGCAGAAGAAGACAATGGGCTGGGAAGCGTCCACCGAGC
GGTTGTACCCCGAGGACGGCGTGCTGAAGGGCGACATTAAGATGGCC
CTGCGCCTGAAGGACGGCGGCCGCTACCTGGCGGACTTCAAGACCAC
CTACAAGGCCAAGAAGCCCGTGCAGATGCCCGGCGCCTACAACGTCG
ACCGCAAGTTGGACATCACCTCCCACAACGAGGACTACACCGTGGTG
GAACAGTACGAACGCTCCGAGGGCCGCCACTCCACCGGCGGCATGGA
CGAGCTGTACAAGTAATAAGAGCTCGCTGATCAGCCTCGACTGTGCC
TTCTAGTTGCCAGCCATCTGTTGTTTGCCCCTCCCCCGTGCCTTCCT
TGACCCTGGAAGGTGCCACTCCCACTGTCCTTTCCTAATAAAATGAG
GAAATTGCATCGCATTGTCTGAGTAGGTGTCATTCTATTCTGGGGGG
TGGGGTGGGGCAGGACAGCAAGGGGGAGGATTGGGAAGACAATAGCA
GGCATGCTGGGGATGCGGTGGGCTCTATGGAAGCTTGAATTCAGCTG
ACGTGCCTCGGACCGCTAGGAACCCCTAGTGATGGAGTTGGCCACTC
CCTCTCTGCGCGCTCGCTCGCTCACTGAGGCCGGGCGACCAAAGGTC
GCCCGACGCCCGGGCTTTGCCCGGGCGGCCTCAGTGAGCGAGCGAGC
GCGCAG
Exemplary pITR.CMV.hKCNQ4codop_v2.mScarlet
sequence
(SEQ ID NO: 268)
CTGCGCGCTCGCTCGCTCACTGAGGCCGCCCGGGCGTCGGGCGACCT
TTGGTCGCCCGGCCTCAGTGAGCGAGCGAGCGCGCAGAGAGGGAGTG
GCCAACTCCATCACTAGGGGTTCCTGCGGCCGCACGCGTCTAGATCC
CATATATGGAGTTCCGCGTTACATAACTTACGGTAAATGGCCCGCCT
GGCTGACCGCCCAACGACCCCCGCCCATTGACGTCAATAATGACGTA
TGTTCCCATAGTAACGCCAATAGGGACTTTCCATTGACGTCAATGGG
TGGAGTATTTACGGTAAACTGCCCACTTGGCAGTACATCAAGTGTAT
CATATGCCAAGTACGCCCCCTATTGACGTCAATGACGGTAAATGGCC
CGCCTGGCATTATGCCCAGTACATGACCTTATGGGACTTTCCTACTT
GGCAGTACATCTACGTATTAGTCATCGCTATTACCATGGTGATGCGG
TTTTGGCAGTACATCAATGGGCGTGGATAGCGGTTTGACTCACGGGG
ATTTCCAAGTCTCCACCCCATTGACGTCAATGGGAGTTTGTTTTGGC
ACCAAAATCAACGGGACTTTCCAAAATGTCGTAACAACTCCGCCCCA
TTGACGCAAATGGGCGGTAGGCGTGTACGGTGGGAGGTCTATATAAG
CAGAGCTCGTTTAGTGAACCGTcagatcgcctggagacgcACCGGTG
CCACCATGGCTGAAGCCCCTCCTAGAAGGCTTGGACTGGGACCTCCT
CCTGGGGATGCTCCTAGAGCTGAACTGGTGGCTCTGACAGCCGTGCA
GTCTGAACAAGGCGAAGCTGGTGGCGGCGGATCTCCACGTAGACTTG
GACTGCTGGGAAGCCCTCTTCCTCCTGGTGCTCCACTTCCTGGACCT
GGCAGTGGATCTGGATCTGCCTGTGGCCAGAGAAGCTCTGCCGCTCA
CAAGAGATACCGGCGGCTGCAGAACTGGGTGTACAACGTGCTGGAAA
GACCCAGAGGCTGGGCCTTCGTGTACCACGTGTTCATCTTTCTGCTG
GTGTTCAGCTGCCTGGTGCTGTCCGTGCTGAGCACCATCCAAGAACA
TCAAGAGCTGGCTAACGAGTGCCTGTTAATACTGGAGTTTGTGATGA
TTGTGGTGTTCGGCCTCGAGTACATCGTCCGCGTTTGGAGCGCCGGC
TGCTGCTGCAGATATAGAGGTTGGCAAGGCAGATTCCGCTTCGCCAG
AAAGCCCTTCTGCGTGATCGACTTCATCGTGTTCGTGGCCAGCGTGG
CCGTGATTGCTGCTGGCACACAGGGCAACATCTTCGCCACAAGCGCC
CTGCGGAGCATGCGGTTTCTGCAGATCCTGAGAATGGTCCGAATGGA
CAGAAGAGGCGGCACCTGGAAGCTGCTGGGCTCTGTGGTGTACGCCC
ACAGCAAAGAGCTGATCACCGCCTGGTACATCGGATTTCTGGTGCTG
ATCTTCGCCTCCTTCCTGGTGTACCTGGCCGAGAAGGACGCCAACAG
CGACTTTAGCAGCTACGCCGACTCTCTTTGGTGGGGCACCATCACAC
TGACCACCATCGGCTACGGCGACAAGACCCCTCACACATGGCTGGGA
AGAGTGCTGGCCGCTGGATTTGCTCTGCTGGGCATCAGCTTTTTCGC
CCTGCCTGCCGGAATCCTCGGATCTGGCTTTGCCCTGAAGGTGCAAG
AGCAGCATAGACAAAAGCATTTTGAAAAGAGAAGAATGCCTGCCGCC
AACCTGATTCAGGCCGCTTGGAGACTGTACAGCACCGACATGAGCAG
AGCCTACCTGACCGCCACGTGGTATTATTACGATTCGATCCTGCCTA
GCTTCCGCGAACTGGCCCTGCTGTTTGAGCATGTGCAGAGAGCCAGA
AACGGCGGCCTCAGACCTCTGGAAGTTCGGAGAGCACCTGTGCCTGA
TGGCGCCCCTTCTAGATATCCTCCAGTGGCCACCTGTCACAGACCCG
GCAGCACATCTTTTTGCCCTGGCGAGTCTAGCCGGATGGGCATCAAG
GACAGAATCAGAATGGGCAGCAGCCAGCGGAGAACAGGCCCTTCTAA
ACAGCATCTGGCCCCTCCAACCATGCCTACAAGCCCTAGCTCTGAGC
AAGTGGGCGAAGCCACCTCTCCTACCAAGGTGCAGAAGTCCTGGTCC
TTCAACGACCGGACCAGATTTAGAGCCAGCCTCCGGCTGAAGCCCAG
AACCTCTGCCGAGGATGCCCCTTCTGAAGAGGTGGCCGAAGAGAAGT
CCTACCAGTGCGAGCTGACCGTGGACGACATCATGCCAGCCGTGAAA
ACCGTGATAAGGTCTATACGCATCCTGAAGTTCCTGGTGGCCAAGCG
GAAGTTCAAAGAGACACTGCGGCCCTACGACGTGAAGGACGTGATCG
AGCAGTATTCTGCCGGCCACCTGGACATGCTGGGCAGAATCAAGAGC
CTGCAGACCAGAGTGGACCAGATCGTTGGAAGAGGCCCAGGCGACAG
AAAGGCCAGAGAGAAGGGCGATAAGGGCCCATCTGATGCCGAGGTTG
TCGACGAGATATCAATGATGGGCAGAGTCGTGAAAGTCGAAAAACAG
GTGCAGAGCATCGAGCACAAGCTGGACCTGCTGCTGGGATTCTACAG
CCGGTGTCTGAGAAGCGGCACATCTGCATCTCTGGGCGCTGTGCAGG
TCCCACTGTTCGATCCTGATATTACGAGCGATTATCACAGCCCCGTG
GACCACGAGGACATCTCCGTTTCTGCTCAGACCCTGAGCATCAGCAG
ATCCGTGTCCACCAACATGGACGGATCCCGGGCTGACTACAAAGACC
ATGACGGTGATTATAAAGATCATGACATCGACTACAAGGATGACGAT
GACAAGGGCTCCGGAGAGGGCAGAGGAAGTCTGCTAACATGCGGTGA
CGTCGAGGAGAATCCTGGCCCAATGGTGAGCAAGGGCGAGGCAGTGA
TCAAGGAGTTCATGCGGTTCAAGGTGCACATGGAGGGCTCCATGAAC
GGCCACGAGTTCGAGATCGAGGGCGAGGGCGAGGGCCGCCCCTACGA
GGGCACCCAGACCGCCAAGCTGAAGGTGACCAAGGGTGGCCCCCTGC
CCTTCTCCTGGGACATCCTGTCCCCTCAGTTCATGTACGGCTCCAGG
GCCTTCATCAAGCACCCCGCCGACATCCCCGACTACTATAAGCAGTC
CTTCCCCGAGGGCTTCAAGTGGGAGCGCGTGATGAACTTCGAGGACG
GCGGCGCCGTGACCGTGACCCAGGACACCTCCCTGGAGGACGGCACC
CTGATCTACAAGGTGAAGCTCCGCGGCACCAACTTCCCTCCTGACGG
CCCCGTAATGCAGAAGAAGACAATGGGCTGGGAAGCGTCCACCGAGC
GGTTGTACCCCGAGGACGGCGTGCTGAAGGGCGACATTAAGATGGCC
CTGCGCCTGAAGGACGGCGGCCGCTACCTGGCGGACTTCAAGACCAC
CTACAAGGCCAAGAAGCCCGTGCAGATGCCCGGCGCCTACAACGTCG
ACCGCAAGTTGGACATCACCTCCCACAACGAGGACTACACCGTGGTG
GAACAGTACGAACGCTCCGAGGGCCGCCACTCCACCGGCGGCATGGA
CGAGCTGTACAAGTAATAAGAGCTCGCTGATCAGCCTCGACTGTGCC
TTCTAGTTGCCAGCCATCTGTTGTTTGCCCCTCCCCCGTGCCTTCCT
TGACCCTGGAAGGTGCCACTCCCACTGTCCTTTCCTAATAAAATGAG
GAAATTGCATCGCATTGTCTGAGTAGGTGTCATTCTATTCTGGGGGG
TGGGGTGGGGCAGGACAGCAAGGGGGAGGATTGGGAAGACAATAGCA
GGCATGCTGGGGATGCGGTGGGCTCTATGGAAGCTTGAATTCAGCTG
ACGTGCCTCGGACCGCTAGGAACCCCTAGTGATGGAGTTGGCCACTC
CCTCTCTGCGCGCTCGCTCGCTCACTGAGGCCGGGCGACCAAAGGTC
GCCCGACGCCCGGGCTTTGCCCGGGCGGCCTCAGTGAGCGAGCGAGC
GCGCAG
Exemplary pITR-CMV.hKCNQ4codop.U6-hsammu386Fw
sequence
(SEQ ID NO: 269)
CTGCGCGCTCGCTCGCTCACTGAGGCCGCCCGGGCGTCGGGCGACCT
TTGGTCGCCCGGCCTCAGTGAGCGAGCGAGCGCGCAGAGAGGGAGTG
GCCAACTCCATCACTAGGGGTTCCTGCGGCCGCACGCGTCTAGATCC
CATATATGGAGTTCCGCGTTACATAACTTACGGTAAATGGCCCGCCT
GGCTGACCGCCCAACGACCCCCGCCCATTGACGTCAATAATGACGTA
TGTTCCCATAGTAACGCCAATAGGGACTTTCCATTGACGTCAATGGG
TGGAGTATTTACGGTAAACTGCCCACTTGGCAGTACATCAAGTGTAT
CATATGCCAAGTACGCCCCCTATTGACGTCAATGACGGTAAATGGCC
CGCCTGGCATTATGCCCAGTACATGACCTTATGGGACTTTCCTACTT
GGCAGTACATCTACGTATTAGTCATCGCTATTACCATGGTGATGCGG
TTTTGGCAGTACATCAATGGGCGTGGATAGCGGTTTGACTCACGGGG
ATTTCCAAGTCTCCACCCCATTGACGTCAATGGGAGTTTGTTTTGGC
ACCAAAATCAACGGGACTTTCCAAAATGTCGTAACAACTCCGCCCCA
TTGACGCAAATGGGCGGTAGGCGTGTACGGTGGGAGGTCTATATAAG
CAGAGCTCGTTTAGTGAACCGTCGTTTAGTGAACCGTcagatcgcct
ggagacgcACCGGTGCCACCATGGCTGAAGCCCCTCCTAGAAGGCTT
GGACTGGGACCTCCTCCTGGGGATGCTCCTAGAGCTGAACTGGTGGC
TCTGACAGCCGTGCAGTCTGAACAAGGCGAAGCTGGTGGCGGCGGAT
CTCCACGTAGACTTGGACTGCTGGGAAGCCCTCTTCCTCCTGGTGCT
CCACTTCCTGGACCTGGCAGTGGATCTGGATCTGCCTGTGGCCAGAG
AAGCTCTGCCGCTCACAAGAGATACCGGCGGCTGCAGAACTGGGTGT
ACAACGTGCTGGAAAGACCCAGAGGCTGGGCCTTCGTGTACCACGTG
TTCATCTTTCTGCTGGTGTTCAGCTGCCTGGTGCTGTCCGTGCTGAG
CACCATCCAAGAACATCAAGAGCTGGCTAACGAGTGCCTGTTAATAC
TGGAGTTTGTGATGATTGTGGTGTTCGGCCTCGAGTACATCGTCCGC
GTTTGGAGCGCCGGCTGCTGCTGCAGATATAGAGGTTGGCAAGGCAG
ATTCCGCTTCGCCAGAAAGCCCTTCTGCGTGATCGACTTCATCGTGT
TCGTGGCCAGCGTGGCCGTGATTGCTGCTGGCACACAGGGCAACATC
TTCGCCACAAGCGCCCTGCGGAGCATGCGGTTTCTGCAGATCCTGAG
AATGGTCCGAATGGACAGAAGAGGCGGCACCTGGAAGCTGCTGGGCT
CTGTGGTGTACGCCCACAGCAAAGAGCTGATCACCGCCTGGTACATC
GGATTTCTGGTGCTGATCTTCGCCTCCTTCCTGGTGTACCTGGCCGA
GAAGGACGCCAACAGCGACTTTAGCAGCTACGCCGACTCTCTTTGGT
GGGGCACCATCACACTGACCACCATCGGCTACGGCGACAAGACCCCT
CACACATGGCTGGGAAGAGTGCTGGCCGCTGGATTTGCTCTGCTGGG
CATCAGCTTTTTCGCCCTGCCTGCCGGAATCCTCGGATCTGGCTTTG
CCCTGAAGGTGCAAGAGCAGCACCGGCAGAAGCACTTCGAGAAGAGA
AGAATGCCTGCCGCCAACCTGATTCAGGCCGCTTGGAGACTGTACAG
CACCGACATGAGCAGAGCCTACCTGACCGCCACGTGGTATTATTACG
ACTCGATCCTGCCTAGCTTCCGCGAACTGGCCCTGCTGTTTGAGCAT
GTGCAGAGAGCCAGAAACGGCGGCCTCAGACCTCTGGAAGTTCGGAG
AGCACCTGTGCCTGATGGCGCCCCTTCTAGATATCCTCCAGTGGCCA
CCTGTCACAGACCCGGCAGCACATCTTTTTGCCCTGGCGAGTCTAGC
CGGATGGGCATCAAGGACAGAATCAGAATGGGCAGCAGCCAGCGGAG
AACAGGCCCTTCTAAACAGCATCTGGCCCCTCCAACCATGCCTACAA
GCCCTAGCTCTGAGCAAGTGGGCGAAGCCACCTCTCCTACCAAGGTG
CAGAAGTCCTGGTCCTTCAACGACCGGACCAGATTCAGAGCCAGCCT
GAGACTGAAGCCCAGAACCTCTGCCGAGGATGCCCCTTCTGAAGAGG
TGGCCGAAGAGAAGTCCTACCAGTGCGAGCTGACCGTGGACGACATC
ATGCCAGCCGTGAAAACCGTGATACGGTCTATCCGGATCCTGAAGTT
CCTGGTGGCCAAGCGGAAGTTCAAAGAGACACTGCGGCCCTACGACG
TGAAGGACGTGATCGAGCAGTATTCTGCCGGCCACCTGGACATGCTG
GGCAGAATCAAGAGCCTGCAGACCAGAGTGGACCAGATCGTTGGAAG
AGGCCCAGGCGACAGAAAGGCCAGAGAGAAGGGCGATAAGGGCCCAT
CTGATGCCGAGGTTGTCGACGAGATATCAATGATGGGCAGAGTGGTC
AAGGTGGAAAAACAGGTGCAGAGCATCGAGCACAAGCTGGACCTGCT
GCTGGGATTCTACAGCCGGTGTCTGAGAAGCGGCACATCTGCATCTC
TGGGCGCTGTGCAGGTCCCACTGTTCGACCCTGATATCACCAGCGAC
TATCACAGCCCCGTGGACCACGAGGACATCTCCGTTTCTGCTCAGAC
CCTGAGCATCAGCAGATCCGTGTCCACCAACATGGACTAATAAGAGC
TCGCTGATCAGCCTCGACTGTGCCTTCTAGTTGCCAGCCATCTGTTG
TTTGCCCCTCCCCCGTGCCTTCCTTGACCCTGGAAGGTGCCACTCCC
ACTGTCCTTTCCTAATAAAATGAGGAAATTGCATCGCATTGTCTGAG
TAGGTGTCATTCTATTCTGGGGGGTGGGGTGGGGCAGGACAGCAAGG
GGGAGGATTGGGAAGACAATAGCAGGCATGCTGGGGATGCGGTGGGC
TCTATGGTTAATTAAGGTCGGGCAGGAAGAGGGCCTATTTCCCATGA
TTCCTTCATATTTGCATATACGATACAAGGCTGTTAGAGAGATAATT
AGAATTAATTTGACTGTAAACACAAAGATATTAGTACAAAATACGTG
ACGTAGAAAGTAATAATTTCTTGGGTAGTTTGCAGTTTTAAAATTAT
GTTTTAAAATGGACTATCATATGCTTACCGTAACTTGAAAGTATTTC
GATTTCTTGGCTTTATATATCTTGTGGAAAGGACGAAACACCGAGGA
GCACCAGGAACTTGCCAGTTTAAGTACTCTGTGCTGGAAACAGCACA
GAATCTACTTAAACAAGGCAAAATGCCGTGTTTATCTCGTCAACTTG
TTGGCGAGATTTTTTCTAAAGCTTGAATTCAAGCTTGAATTCAGCTG
ACGTGCCTCGGACCGCTAGGAACCCCTAGTGATGGAGTTGGCCACTC
CCTCTCTGCGCGCTCGCTCGCTCACTGAGGCCGGGCGACCAAAGGTC
GCCCGACGCCCGGGCTTTGCCCGGGCGGCCTCAGTGAGCGAGCGAGC
GCGCAG
Exemplary pITR-CMV.hKCNQ4codop.U6-hsa408Rev
sequence
(SEQ ID NO: 270)
CTGCGCGCTCGCTCGCTCACTGAGGCCGCCCGGGCGTCGGGCGACCT
TTGGTCGCCCGGCCTCAGTGAGCGAGCGAGCGCGCAGAGAGGGAGTG
GCCAACTCCATCACTAGGGGTTCCTGCGGCCGCACGCGTCTAGATCC
CATATATGGAGTTCCGCGTTACATAACTTACGGTAAATGGCCCGCCT
GGCTGACCGCCCAACGACCCCCGCCCATTGACGTCAATAATGACGTA
TGTTCCCATAGTAACGCCAATAGGGACTTTCCATTGACGTCAATGGG
TGGAGTATTTACGGTAAACTGCCCACTTGGCAGTACATCAAGTGTAT
CATATGCCAAGTACGCCCCCTATTGACGTCAATGACGGTAAATGGCC
CGCCTGGCATTATGCCCAGTACATGACCTTATGGGACTTTCCTACTT
GGCAGTACATCTACGTATTAGTCATCGCTATTACCATGGTGATGCGG
TTTTGGCAGTACATCAATGGGCGTGGATAGCGGTTTGACTCACGGGG
ATTTCCAAGTCTCCACCCCATTGACGTCAATGGGAGTTTGTTTTGGC
ACCAAAATCAACGGGACTTTCCAAAATGTCGTAACAACTCCGCCCCA
TTGACGCAAATGGGCGGTAGGCGTGTACGGTGGGAGGTCTATATAAG
CAGAGCTCGTTTAGTGAACCGTCGTTTAGTGAACCGTcagatcgcct
ggagacgcACCGGTGCCACCATGGCTGAAGCCCCTCCTAGAAGGCTT
GGACTGGGACCTCCTCCTGGGGATGCTCCTAGAGCTGAACTGGTGGC
TCTGACAGCCGTGCAGTCTGAACAAGGCGAAGCTGGTGGCGGCGGAT
CTCCACGTAGACTTGGACTGCTGGGAAGCCCTCTTCCTCCTGGTGCT
CCACTTCCTGGACCTGGCAGTGGATCTGGATCTGCCTGTGGCCAGAG
AAGCTCTGCCGCTCACAAGAGATACCGGCGGCTGCAGAACTGGGTGT
ACAACGTGCTGGAAAGACCCAGAGGCTGGGCCTTCGTGTACCACGTG
TTCATCTTTCTGCTGGTGTTCAGCTGCCTGGTGCTGTCCGTGCTGAG
CACCATCCAAGAACATCAAGAGCTGGCTAACGAGTGCCTGTTAATAC
TGGAGTTTGTGATGATTGTGGTGTTCGGCCTCGAGTACATCGTCCGC
GTTTGGAGCGCCGGCTGCTGCTGCAGATATAGAGGTTGGCAAGGCAG
ATTCCGCTTCGCCAGAAAGCCCTTCTGCGTGATCGACTTCATCGTGT
TCGTGGCCAGCGTGGCCGTGATTGCTGCTGGCACACAGGGCAACATC
TTCGCCACAAGCGCCCTGCGGAGCATGCGGTTTCTGCAGATCCTGAG
AATGGTCCGAATGGACAGAAGAGGCGGCACCTGGAAGCTGCTGGGCT
CTGTGGTGTACGCCCACAGCAAAGAGCTGATCACCGCCTGGTACATC
GGATTTCTGGTGCTGATCTTCGCCTCCTTCCTGGTGTACCTGGCCGA
GAAGGACGCCAACAGCGACTTTAGCAGCTACGCCGACTCTCTTTGGT
GGGGCACCATCACACTGACCACCATCGGCTACGGCGACAAGACCCCT
CACACATGGCTGGGAAGAGTGCTGGCCGCTGGATTTGCTCTGCTGGG
CATCAGCTTTTTCGCCCTGCCTGCCGGAATCCTCGGATCTGGCTTTG
CCCTGAAGGTGCAAGAGCAGCACCGGCAGAAGCACTTCGAGAAGAGA
AGAATGCCTGCCGCCAACCTGATTCAGGCCGCTTGGAGACTGTACAG
CACCGACATGAGCAGAGCCTACCTGACCGCCACGTGGTATTATTACG
ACTCGATCCTGCCTAGCTTCCGCGAACTGGCCCTGCTGTTTGAGCAT
GTGCAGAGAGCCAGAAACGGCGGCCTCAGACCTCTGGAAGTTCGGAG
AGCACCTGTGCCTGATGGCGCCCCTTCTAGATATCCTCCAGTGGCCA
CCTGTCACAGACCCGGCAGCACATCTTTTTGCCCTGGCGAGTCTAGC
CGGATGGGCATCAAGGACAGAATCAGAATGGGCAGCAGCCAGCGGAG
AACAGGCCCTTCTAAACAGCATCTGGCCCCTCCAACCATGCCTACAA
GCCCTAGCTCTGAGCAAGTGGGCGAAGCCACCTCTCCTACCAAGGTG
CAGAAGTCCTGGTCCTTCAACGACCGGACCAGATTCAGAGCCAGCCT
GAGACTGAAGCCCAGAACCTCTGCCGAGGATGCCCCTTCTGAAGAGG
TGGCCGAAGAGAAGTCCTACCAGTGCGAGCTGACCGTGGACGACATC
ATGCCAGCCGTGAAAACCGTGATACGGTCTATCCGGATCCTGAAGTT
CCTGGTGGCCAAGCGGAAGTTCAAAGAGACACTGCGGCCCTACGACG
TGAAGGACGTGATCGAGCAGTATTCTGCCGGCCACCTGGACATGCTG
GGCAGAATCAAGAGCCTGCAGACCAGAGTGGACCAGATCGTTGGAAG
AGGCCCAGGCGACAGAAAGGCCAGAGAGAAGGGCGATAAGGGCCCAT
CTGATGCCGAGGTTGTCGACGAGATATCAATGATGGGCAGAGTGGTC
AAGGTGGAAAAACAGGTGCAGAGCATCGAGCACAAGCTGGACCTGCT
GCTGGGATTCTACAGCCGGTGTCTGAGAAGCGGCACATCTGCATCTC
TGGGCGCTGTGCAGGTCCCACTGTTCGACCCTGATATCACCAGCGAC
TATCACAGCCCCGTGGACCACGAGGACATCTCCGTTTCTGCTCAGAC
CCTGAGCATCAGCAGATCCGTGTCCACCAACATGGACTAATAAGAGC
TCGCTGATCAGCCTCGACTGTGCCTTCTAGTTGCCAGCCATCTGTTG
TTTGCCCCTCCCCCGTGCCTTCCTTGACCCTGGAAGGTGCCACTCCC
ACTGTCCTTTCCTAATAAAATGAGGAAATTGCATCGCATTGTCTGAG
TAGGTGTCATTCTATTCTGGGGGGTGGGGTGGGGCAGGACAGCAAGG
GGGAGGATTGGGAAGACAATAGCAGGCATGCTGGGGATGCGGTGGGC
TCTATGGTTAATTAAGGTCGGGCAGGAAGAGGGCCTATTTCCCATGA
TTCCTTCATATTTGCATATACGATACAAGGCTGTTAGAGAGATAATT
AGAATTAATTTGACTGTAAACACAAAGATATTAGTACAAAATACGTG
ACGTAGAAAGTAATAATTTCTTGGGTAGTTTGCAGTTTTAAAATTAT
GTTTTAAAATGGACTATCATATGCTTACCGTAACTTGAAAGTATTTC
GATTTCTTGGCTTTATATATCTTGTGGAAAGGACGAAACACCGAAGC
CGAAAACCACGATCATCGTTTAAGTACTCTGTGCTGGAAACAGCACA
GAATCTACTTAAACAAGGCAAAATGCCGTGTTTATCTCGTCAACTTG
TTGGCGAGATTTTTTCTAAAGCTTGAATTCAAGCTTGAATTCAGCTG
ACGTGCCTCGGACCGCTAGGAACCCCTAGTGATGGAGTTGGCCACTC
CCTCTCTGCGCGCTCGCTCGCTCACTGAGGCCGGGCGACCAAAGGTC
GCCCGACGCCCGGGCTTTGCCCGGGCGGCCTCAGTGAGCGAGCGAGC
GCGCAG
Exemplary pITR-CMV.hKCNQ4codop.U6-mmu408Rev
sequence
(SEQ ID NO: 271)
CTGCGCGCTCGCTCGCTCACTGAGGCCGCCCGGGCGTCGGGCGACCT
TTGGTCGCCCGGCCTCAGTGAGCGAGCGAGCGCGCAGAGAGGGAGTG
GCCAACTCCATCACTAGGGGTTCCTGCGGCCGCACGCGTCTAGATCC
CATATATGGAGTTCCGCGTTACATAACTTACGGTAAATGGCCCGCCT
GGCTGACCGCCCAACGACCCCCGCCCATTGACGTCAATAATGACGTA
TGTTCCCATAGTAACGCCAATAGGGACTTTCCATTGACGTCAATGGG
TGGAGTATTTACGGTAAACTGCCCACTTGGCAGTACATCAAGTGTAT
CATATGCCAAGTACGCCCCCTATTGACGTCAATGACGGTAAATGGCC
CGCCTGGCATTATGCCCAGTACATGACCTTATGGGACTTTCCTACTT
GGCAGTACATCTACGTATTAGTCATCGCTATTACCATGGTGATGCGG
TTTTGGCAGTACATCAATGGGCGTGGATAGCGGTTTGACTCACGGGG
ATTTCCAAGTCTCCACCCCATTGACGTCAATGGGAGTTTGTTTTGGC
ACCAAAATCAACGGGACTTTCCAAAATGTCGTAACAACTCCGCCCCA
TTGACGCAAATGGGCGGTAGGCGTGTACGGTGGGAGGTCTATATAAG
CAGAGCTCGTTTAGTGAACCGTCGTTTAGTGAACCGTcagatcgcct
ggagacgcACCGGTGCCACCATGGCTGAAGCCCCTCCTAGAAGGCTT
GGACTGGGACCTCCTCCTGGGGATGCTCCTAGAGCTGAACTGGTGGC
TCTGACAGCCGTGCAGTCTGAACAAGGCGAAGCTGGTGGCGGCGGAT
CTCCACGTAGACTTGGACTGCTGGGAAGCCCTCTTCCTCCTGGTGCT
CCACTTCCTGGACCTGGCAGTGGATCTGGATCTGCCTGTGGCCAGAG
AAGCTCTGCCGCTCACAAGAGATACCGGCGGCTGCAGAACTGGGTGT
ACAACGTGCTGGAAAGACCCAGAGGCTGGGCCTTCGTGTACCACGTG
TTCATCTTTCTGCTGGTGTTCAGCTGCCTGGTGCTGTCCGTGCTGAG
CACCATCCAAGAACATCAAGAGCTGGCTAACGAGTGCCTGTTAATAC
TGGAGTTTGTGATGATTGTGGTGTTCGGCCTCGAGTACATCGTCCGC
GTTTGGAGCGCCGGCTGCTGCTGCAGATATAGAGGTTGGCAAGGCAG
ATTCCGCTTCGCCAGAAAGCCCTTCTGCGTGATCGACTTCATCGTGT
TCGTGGCCAGCGTGGCCGTGATTGCTGCTGGCACACAGGGCAACATC
TTCGCCACAAGCGCCCTGCGGAGCATGCGGTTTCTGCAGATCCTGAG
AATGGTCCGAATGGACAGAAGAGGCGGCACCTGGAAGCTGCTGGGCT
CTGTGGTGTACGCCCACAGCAAAGAGCTGATCACCGCCTGGTACATC
GGATTTCTGGTGCTGATCTTCGCCTCCTTCCTGGTGTACCTGGCCGA
GAAGGACGCCAACAGCGACTTTAGCAGCTACGCCGACTCTCTTTGGT
GGGGCACCATCACACTGACCACCATCGGCTACGGCGACAAGACCCCT
CACACATGGCTGGGAAGAGTGCTGGCCGCTGGATTTGCTCTGCTGGG
CATCAGCTTTTTCGCCCTGCCTGCCGGAATCCTCGGATCTGGCTTTG
CCCTGAAGGTGCAAGAGCAGCACCGGCAGAAGCACTTCGAGAAGAGA
AGAATGCCTGCCGCCAACCTGATTCAGGCCGCTTGGAGACTGTACAG
CACCGACATGAGCAGAGCCTACCTGACCGCCACGTGGTATTATTACG
ACTCGATCCTGCCTAGCTTCCGCGAACTGGCCCTGCTGTTTGAGCAT
GTGCAGAGAGCCAGAAACGGCGGCCTCAGACCTCTGGAAGTTCGGAG
AGCACCTGTGCCTGATGGCGCCCCTTCTAGATATCCTCCAGTGGCCA
CCTGTCACAGACCCGGCAGCACATCTTTTTGCCCTGGCGAGTCTAGC
CGGATGGGCATCAAGGACAGAATCAGAATGGGCAGCAGCCAGCGGAG
AACAGGCCCTTCTAAACAGCATCTGGCCCCTCCAACCATGCCTACAA
GCCCTAGCTCTGAGCAAGTGGGCGAAGCCACCTCTCCTACCAAGGTG
CAGAAGTCCTGGTCCTTCAACGACCGGACCAGATTCAGAGCCAGCCT
GAGACTGAAGCCCAGAACCTCTGCCGAGGATGCCCCTTCTGAAGAGG
TGGCCGAAGAGAAGTCCTACCAGTGCGAGCTGACCGTGGACGACATC
ATGCCAGCCGTGAAAACCGTGATACGGTCTATCCGGATCCTGAAGTT
CCTGGTGGCCAAGCGGAAGTTCAAAGAGACACTGCGGCCCTACGACG
TGAAGGACGTGATCGAGCAGTATTCTGCCGGCCACCTGGACATGCTG
GGCAGAATCAAGAGCCTGCAGACCAGAGTGGACCAGATCGTTGGAAG
AGGCCCAGGCGACAGAAAGGCCAGAGAGAAGGGCGATAAGGGCCCAT
CTGATGCCGAGGTTGTCGACGAGATATCAATGATGGGCAGAGTGGTC
AAGGTGGAAAAACAGGTGCAGAGCATCGAGCACAAGCTGGACCTGCT
GCTGGGATTCTACAGCCGGTGTCTGAGAAGCGGCACATCTGCATCTC
TGGGCGCTGTGCAGGTCCCACTGTTCGACCCTGATATCACCAGCGAC
TATCACAGCCCCGTGGACCACGAGGACATCTCCGTTTCTGCTCAGAC
CCTGAGCATCAGCAGATCCGTGTCCACCAACATGGACTAATAAGAGC
TCGCTGATCAGCCTCGACTGTGCCTTCTAGTTGCCAGCCATCTGTTG
TTTGCCCCTCCCCCGTGCCTTCCTTGACCCTGGAAGGTGCCACTCCC
ACTGTCCTTTCCTAATAAAATGAGGAAATTGCATCGCATTGTCTGAG
TAGGTGTCATTCTATTCTGGGGGGTGGGGTGGGGCAGGACAGCAAGG
GGGAGGATTGGGAAGACAATAGCAGGCATGCTGGGGATGCGGTGGGC
TCTATGGTTAATTAAGGTCGGGCAGGAAGAGGGCCTATTTCCCATGA
TTCCTTCATATTTGCATATACGATACAAGGCTGTTAGAGAGATAATT
AGAATTAATTTGACTGTAAACACAAAGATATTAGTACAAAATACGTG
ACGTAGAAAGTAATAATTTCTTGGGTAGTTTGCAGTTTTAAAATTAT
GTTTTAAAATGGACTATCATATGCTTACCGTAACTTGAAAGTATTTC
GATTTCTTGGCTTTATATATCTTGTGGAAAGGACGAAACACCGAAGC
CAAAGACCACAATCATCGTTTAAGTACTCTGTGCTGGAAACAGCACA
GAATCTACTTAAACAAGGCAAAATGCCGTGTTTATCTCGTCAACTTG
TTGGCGAGATTTTTTCTAAAGCTTGAATTCAAGCTTGAATTCAGCTG
ACGTGCCTCGGACCGCTAGGAACCCCTAGTGATGGAGTTGGCCACTC
CCTCTCTGCGCGCTCGCTCGCTCACTGAGGCCGGGCGACCAAAGGTC
GCCCGACGCCCGGGCTTTGCCCGGGCGGCCTCAGTGAGCGAGCGAGC
GCGCAG
Exemplary pITR-CMV.hKCNQ4codop.U6-hsammu386Fw
sequence
(SEQ ID NO: 272)
CCTGCAGGCAGCTGCGCGCTCGCTCGCTCACTGAGGCCGCCCGGGCG
TCGGGCGACCTTTGGTCGCCCGGCCTCAGTGAGCGAGCGAGCGCGCA
GAGAGGGAGTGGCCAACTCCATCACTAGGGGTTCCTGCGGCCGCACG
CGTCTAGATCCCATATATGGAGTTCCGCGTTACATAACTTACGGTAA
ATGGCCCGCCTGGCTGACCGCCCAACGACCCCCGCCCATTGACGTCA
ATAATGACGTATGTTCCCATAGTAACGCCAATAGGGACTTTCCATTG
ACGTCAATGGGTGGAGTATTTACGGTAAACTGCCCACTTGGCAGTAC
ATCAAGTGTATCATATGCCAAGTACGCCCCCTATTGACGTCAATGAC
GGTAAATGGCCCGCCTGGCATTATGCCCAGTACATGACCTTATGGGA
CTTTCCTACTTGGCAGTACATCTACGTATTAGTCATCGCTATTACCA
TGGTGATGCGGTTTTGGCAGTACATCAATGGGCGTGGATAGCGGTTT
GACTCACGGGGATTTCCAAGTCTCCACCCCATTGACGTCAATGGGAG
TTTGTTTTGGCACCAAAATCAACGGGACTTTCCAAAATGTCGTAACA
ACTCCGCCCCATTGACGCAAATGGGCGGTAGGCGTGTACGGTGGGAG
GTCTATATAAGCAGAGCTCGTTTAGTGAACCGTCGTTTAGTGAACCG
TCAGATCGCCTGGAGACGCACCGGTGCCACCATGGCTGAAGCCCCTC
CTAGAAGGCTTGGACTGGGACCTCCTCCTGGGGATGCTCCTAGAGCT
GAACTGGTGGCTCTGACAGCCGTGCAGTCTGAACAAGGCGAAGCTGG
TGGCGGCGGATCTCCACGTAGACTTGGACTGCTGGGAAGCCCTCTTC
CTCCTGGTGCTCCACTTCCTGGACCTGGCAGTGGATCTGGATCTGCC
TGTGGCCAGAGAAGCTCTGCCGCTCACAAGAGATACCGGCGGCTGCA
GAACTGGGTGTACAACGTGCTGGAAAGACCCAGAGGCTGGGCCTTCG
TGTACCACGTGTTCATCTTTCTGCTGGTGTTCAGCTGCCTGGTGCTG
TCCGTGCTGAGCACCATCCAAGAACATCAAGAGCTGGCTAACGAGTG
CCTGTTAATACTGGAGTTTGTGATGATTGTGGTGTTCGGCCTCGAGT
ACATCGTCCGCGTTTGGAGCGCCGGCTGCTGCTGCAGATATAGAGGT
TGGCAAGGCAGATTCCGCTTCGCCAGAAAGCCCTTCTGCGTGATCGA
CTTCATCGTGTTCGTGGCCAGCGTGGCCGTGATTGCTGCTGGCACAC
AGGGCAACATCTTCGCCACAAGCGCCCTGCGGAGCATGCGGTTTCTG
CAGATCCTGAGAATGGTCCGAATGGACAGAAGAGGCGGCACCTGGAA
GCTGCTGGGCTCTGTGGTGTACGCCCACAGCAAAGAGCTGATCACCG
CCTGGTACATCGGATTTCTGGTGCTGATCTTCGCCTCCTTCCTGGTG
TACCTGGCCGAGAAGGACGCCAACAGCGACTTTAGCAGCTACGCCGA
CTCTCTTTGGTGGGGCACCATCACACTGACCACCATCGGCTACGGCG
ACAAGACCCCTCACACATGGCTGGGAAGAGTGCTGGCCGCTGGATTT
GCTCTGCTGGGCATCAGCTTTTTCGCCCTGCCTGCCGGAATCCTCGG
ATCTGGCTTTGCCCTGAAGGTGCAAGAGCAGCACCGGCAGAAGCACT
TCGAGAAGAGAAGAATGCCTGCCGCCAACCTGATTCAGGCCGCTTGG
AGACTGTACAGCACCGACATGAGCAGAGCCTACCTGACCGCCACGTG
GTATTATTACGACTCGATCCTGCCTAGCTTCCGCGAACTGGCCCTGC
TGTTTGAGCATGTGCAGAGAGCCAGAAACGGCGGCCTCAGACCTCTG
GAAGTTCGGAGAGCACCTGTGCCTGATGGCGCCCCTTCTAGATATCC
TCCAGTGGCCACCTGTCACAGACCCGGCAGCACATCTTTTTGCCCTG
GCGAGTCTAGCCGGATGGGCATCAAGGACAGAATCAGAATGGGCAGC
AGCCAGCGGAGAACAGGCCCTTCTAAACAGCATCTGGCCCCTCCAAC
CATGCCTACAAGCCCTAGCTCTGAGCAAGTGGGCGAAGCCACCTCTC
CTACCAAGGTGCAGAAGTCCTGGTCCTTCAACGACCGGACCAGATTC
AGAGCCAGCCTGAGACTGAAGCCCAGAACCTCTGCCGAGGATGCCCC
TTCTGAAGAGGTGGCCGAAGAGAAGTCCTACCAGTGCGAGCTGACCG
TGGACGACATCATGCCAGCCGTGAAAACCGTGATACGGTCTATCCGG
ATCCTGAAGTTCCTGGTGGCCAAGCGGAAGTTCAAAGAGACACTGCG
GCCCTACGACGTGAAGGACGTGATCGAGCAGTATTCTGCCGGCCACC
TGGACATGCTGGGCAGAATCAAGAGCCTGCAGACCAGAGTGGACCAG
ATCGTTGGAAGAGGCCCAGGCGACAGAAAGGCCAGAGAGAAGGGCGA
TAAGGGCCCATCTGATGCCGAGGTTGTCGACGAGATATCAATGATGG
GCAGAGTGGTCAAGGTGGAAAAACAGGTGCAGAGCATCGAGCACAAG
CTGGACCTGCTGCTGGGATTCTACAGCCGGTGTCTGAGAAGCGGCAC
ATCTGCATCTCTGGGCGCTGTGCAGGTCCCACTGTTCGACCCTGATA
TCACCAGCGACTATCACAGCCCCGTGGACCACGAGGACATCTCCGTT
TCTGCTCAGACCCTGAGCATCAGCAGATCCGTGTCCACCAACATGGA
CTAATAAGAGCTCGCTGATCAGCCTCGACTGTGCCTTCTAGTTGCCA
GCCATCTGTTGTTTGCCCCTCCCCCGTGCCTTCCTTGACCCTGGAAG
GTGCCACTCCCACTGTCCTTTCCTAATAAAATGAGGAAATTGCATCG
CATTGTCTGAGTAGGTGTCATTCTATTCTGGGGGGTGGGGTGGGGCA
GGACAGCAAGGGGGAGGATTGGGAAGACAATAGCAGGCATGCTGGGG
ATGCGGTGGGCTCTATGGTTAATTAAGGTCGGGCAGGAAGAGGGCCT
ATTTCCCATGATTCCTTCATATTTGCATATACGATACAAGGCTGTTA
GAGAGATAATTAGAATTAATTTGAGTGTAAACACAAAGATATTAGTA
GAAAATACGTGACGTAGAAAGTAATAATTTCTTGGGTAGTTTGCAGT
TTTAAAATTATGTTTTAAAATGGACTATCATATGCTTACCGTAACTT
GAAAGTATTTCGATTTCTTGGCTTTATATATCTTGTGGAAAGGACGA
AACACCGAGGAGCACCAGGAACTTGCCAGTTTAAGTACTCTGTGCTG
GAAACAGCACAGAATCTACTTAAACAAGGCAAAATGCCGTGTTTATC
TCGTCAACTTGTTGGCGAGATTTTTTCTAAAGCTTGAATTCAAGCTT
GAATTCAGCTGACGTGCCTCGGACCGCTAGGAACCCCTAGTGATGGA
GTTGGCCACTCCCTCTCTGCGCGCTCGCTCGCTCACTGAGGCCGGGC
GACCAAAGGTCGCCCGACGCCCGGGCTTTGCCCGGGCGGCCTCAGTG
AGCGAGCGAGCGCGCAGCTGCCTGCAGGGGCGCCTGATGCGGTATTT
TCTCCTTACGCATCTGTGCGGTATTTCACACCGCATACGTCAAAGCA
ACCATAGTACGCGCCCTGTAGCGGCGCATTAAGCGCGGCGGGTGTGG
TGGTTACGCGCAGCGTGACCGCTACACTTGCCAGCGCCCTAGCGCCC
GCTCCTTTCGCTTTCTTCCCTTCCTTTCTCGCCACGTTCGCCGGCTT
TCCCCGTCAAGCTCTAAATCGGGGGCTCCCTTTAGGGTTCCGATTTA
GTGCTTTACGGCACCTCGACCCCAAAAAACTTGATTTGGGTGATGGT
TCACGTAGTGGGCCATCGCCCTGATAGACGGTTTTTCGCCCTTTGAC
GTTGGAGTCCACGTTCTTTAATAGTGGACTCTTGTTCCAAACTGGAA
CAACACTCAACCCTATCTCGGGCTATTCTTTTGATTTATAAGGGATT
TTGCCGATTTCGGCCTATTGGTTAAAAAATGAGCTGATTTAACAAAA
ATTTAACGCGAATTTTAACAAAATATTAACGTTTACAATTTTATGGT
GCACTCTCAGTACAATCTGCTCTGATGCCGCATAGTTAAGCCAGCCC
CGACACCCGCCAACACCCGCTGACGCGCCCTGACGGGCTTGTCTGCT
CCCGGCATCCGCTTACAGACAAGCTGTGACCGTCTCCGGGAGCTGCA
TGTGTCAGAGGTTTTCACCGTCATCACCGAAACGCGCGAGACGAAAG
GGCCTCGTGATACGCCTATTTTTATAGGTTAATGTCATGAACAATAA
AACTGTCTGCTTACATAAACAGTAATACAAGGGGTGTTATGAGCCAT
ATTCAACGGGAAACGTCGAGGCCGCGATTAAATTCCAACATGGATGC
TGATTTATATGGGTATAAATGGGCTCGCGATAATGTCGGGCAATCAG
GTGCGACAATCTATCGCTTGTATGGGAAGCCCGATGCGCCAGAGTTG
TTTCTGAAACATGGCAAAGGTAGCGTTGCCAATGATGTTACAGATGA
GATGGTCAGACTAAACTGGCTGACGGAATTTATGCCTCTTCCGACCA
TCAAGCATTTTATCCGTACTCCTGATGATGCATGGTTACTCACCACT
GCGATCCCCGGAAAAACAGCATTCCAGGTATTAGAAGAATATCCTGA
TTCAGGTGAAAATATTGTTGATGCGCTGGCAGTGTTCCTGCGCCGGT
TGCATTCGATTCCTGTTTGTAATTGTCCTTTTAACAGCGATCGCGTA
TTTCGTCTCGCTCAGGCGCAATCACGAATGAATAACGGTTTGGTTGA
TGCGAGTGATTTTGATGACGAGCGTAATGGCTGGCCTGTTGAACAAG
TCTGGAAAGAAATGCATAAACTTTTGCCATTCTCACCGGATTCAGTC
GTCACTCATGGTGATTTCTCACTTGATAACCTTATTTTTGACGAGGG
GAAATTAATAGGTTGTATTGATGTTGGACGAGTCGGAATCGCAGACC
GATACCAGGATCTTGCCATCCTATGGAACTGCCTCGGTGAGTTTTCT
CCTTCATTACAGAAACGGCTTTTTCAAAAATATGGTATTGATAATCC
TGATATGAATAAATTGCAGTTTCATTTGATGCTCGATGAGTTTTTCT
AATCTCATGACCAAAATCCCTTAACGTGAGTTTTCGTTCCACTGAGC
GTCAGACCCCGTAGAAAAGATCAAAGGATCTTCTTGAGATCCTTTTT
TTCTGCGCGTAATCTGCTGCTTGCAAACAAAAAAACCACCGCTACCA
GCGGTGGTTTGTTTGCCGGATCAAGAGCTACCAACTCTTTTTCCGAA
GGTAACTGGCTTCAGCAGAGCGCAGATACCAAATACTGTCCTTCTAG
TGTAGCCGTAGTTAGGCCACCACTTCAAGAACTCTGTAGCACCGCCT
ACATACCTCGCTCTGCTAATCCTGTTACCAGTGGCTGCTGCCAGTGG
CGATAAGTCGTGTCTTACCGGGTTGGACTCAAGACGATAGTTACCGG
ATAAGGCGCAGCGGTCGGGCTGAACGGGGGGTTCGTGCACACAGCCC
AGCTTGGAGCGAACGACCTACACCGAACTGAGATACCTACAGCGTGA
GCTATGAGAAAGCGCCACGCTTCCCGAAGGGAGAAAGGCGGACAGGT
ATCCGGTAAGCGGCAGGGTCGGAACAGGAGAGCGCACGAGGGAGCTT
CCAGGGGGAAACGCCTGGTATCTTTATAGTCCTGTCGGGTTTCGCCA
CCTCTGACTTGAGCGTCGATTTTTGTGATGCTCGTCAGGGGGGCGGA
GCCTATGGAAAAACGCCAGCAACGCGGCCTTTTTACGGTTCCTGGCC
TTTTGCTGGCCTTTTGCTCACATGT
Exemplary pITR-CMV.hKCNQ4codop.U6-hsa408Rev
sequence
(SEQ ID NO: 273)
CCTGCAGGCAGCTGCGCGCTCGCTCGCTCACTGAGGCCGCCCGGGCG
TCGGGCGACCTTTGGTCGCCCGGCCTCAGTGAGCGAGCGAGCGCGCA
GAGAGGGAGTGGCCAACTCCATCACTAGGGGTTCCTGCGGCCGCACG
CGTCTAGATCCCATATATGGAGTTCCGCGTTACATAACTTACGGTAA
ATGGCCCGCCTGGCTGACCGCCCAACGACCCCCGCCCATTGACGTCA
ATAATGACGTATGTTCCCATAGTAACGCCAATAGGGACTTTCCATTG
ACGTCAATGGGTGGAGTATTTACGGTAAACTGCCCACTTGGCAGTAC
ATCAAGTGTATCATATGCCAAGTACGCCCCCTATTGACGTCAATGAC
GGTAAATGGCCCGCCTGGCATTATGCCCAGTACATGACCTTATGGGA
CTTTCCTACTTGGCAGTACATCTACGTATTAGTCATCGCTATTACCA
TGGTGATGCGGTTTTGGCAGTACATCAATGGGCGTGGATAGCGGTTT
GACTCACGGGGATTTCCAAGTCTCCACCCCATTGACGTCAATGGGAG
TTTGTTTTGGCACCAAAATCAACGGGACTTTCCAAAATGTCGTAACA
ACTCCGCCCCATTGACGCAAATGGGCGGTAGGCGTGTACGGTGGGAG
GTCTATATAAGCAGAGCTCGTTTAGTGAACCGTCGTTTAGTGAACCG
TcagatcgcctggagacgcACCGGTGCCACCATGGCTGAAGCCCCTC
CTAGAAGGCTTGGACTGGGACCTCCTCCTGGGGATGCTCCTAGAGCT
GAACTGGTGGCTCTGACAGCCGTGCAGTCTGAACAAGGCGAAGCTGG
TGGCGGCGGATCTCCACGTAGACTTGGACTGCTGGGAAGCCCTCTTC
CTCCTGGTGCTCCACTTCCTGGACCTGGCAGTGGATCTGGATCTGCC
TGTGGCCAGAGAAGCTCTGCCGCTCACAAGAGATACCGGCGGCTGCA
GAACTGGGTGTACAACGTGCTGGAAAGACCCAGAGGCTGGGCCTTCG
TGTACCACGTGTTCATCTTTCTGCTGGTGTTCAGCTGCCTGGTGCTG
TCCGTGCTGAGCACCATCCAAGAACATCAAGAGCTGGCTAACGAGTG
CCTGTTAATACTGGAGTTTGTGATGATTGTGGTGTTCGGCCTCGAGT
ACATCGTCCGCGTTTGGAGCGCCGGCTGCTGCTGCAGATATAGAGGT
TGGCAAGGCAGATTCCGCTTCGCCAGAAAGCCCTTCTGCGTGATCGA
CTTCATCGTGTTCGTGGCCAGCGTGGCCGTGATTGCTGCTGGCACAC
AGGGCAACATCTTCGCCACAAGCGCCCTGCGGAGCATGCGGTTTCTG
CAGATCCTGAGAATGGTCCGAATGGACAGAAGAGGCGGCACCTGGAA
GCTGCTGGGCTCTGTGGTGTACGCCCACAGCAAAGAGCTGATCACCG
CCTGGTACATCGGATTTCTGGTGCTGATCTTCGCCTCCTTCCTGGTG
TACCTGGCCGAGAAGGACGCCAACAGCGACTTTAGCAGCTACGCCGA
CTCTCTTTGGTGGGGCACCATCACACTGACCACCATCGGCTACGGCG
ACAAGACCCCTCACACATGGCTGGGAAGAGTGCTGGCCGCTGGATTT
GCTCTGCTGGGCATCAGCTTTTTCGCCCTGCCTGCCGGAATCCTCGG
ATCTGGCTTTGCCCTGAAGGTGCAAGAGCAGCACCGGCAGAAGCACT
TCGAGAAGAGAAGAATGCCTGCCGCCAACCTGATTCAGGCCGCTTGG
AGACTGTACAGCACCGACATGAGCAGAGCCTACCTGACCGCCACGTG
GTATTATTACGACTCGATCCTGCCTAGCTTCCGCGAACTGGCCCTGC
TGTTTGAGCATGTGCAGAGAGCCAGAAACGGCGGCCTCAGACCTCTG
GAAGTTCGGAGAGCACCTGTGCCTGATGGCGCCCCTTCTAGATATCC
TCCAGTGGCCACCTGTCACAGACCCGGCAGCACATCTTTTTGCCCTG
GCGAGTCTAGCCGGATGGGCATCAAGGACAGAATCAGAATGGGCAGC
AGCCAGCGGAGAACAGGCCCTTCTAAACAGCATCTGGCCCCTCCAAC
CATGCCTACAAGCCCTAGCTCTGAGCAAGTGGGCGAAGCCACCTCTC
CTACCAAGGTGCAGAAGTCCTGGTCCTTCAACGACCGGACCAGATTC
AGAGCCAGCCTGAGACTGAAGCCCAGAACCTCTGCCGAGGATGCCCC
TTCTGAAGAGGTGGCCGAAGAGAAGTCCTACCAGTGCGAGCTGACCG
TGGACGACATCATGCCAGCCGTGAAAACCGTGATACGGTCTATCCGG
ATCCTGAAGTTCCTGGTGGCCAAGCGGAAGTTCAAAGAGACACTGCG
GCCCTACGACGTGAAGGACGTGATCGAGCAGTATTCTGCCGGCCACC
TGGACATGCTGGGCAGAATCAAGAGCCTGCAGACCAGAGTGGACCAG
ATCGTTGGAAGAGGCCCAGGCGACAGAAAGGCCAGAGAGAAGGGCGA
TAAGGGCCCATCTGATGCCGAGGTTGTCGACGAGATATCAATGATGG
GCAGAGTGGTCAAGGTGGAAAAACAGGTGCAGAGCATCGAGCACAAG
CTGGACCTGCTGCTGGGATTCTACAGCCGGTGTCTGAGAAGCGGCAC
ATCTGCATCTCTGGGCGCTGTGCAGGTCCCACTGTTCGACCCTGATA
TCACCAGCGACTATCACAGCCCCGTGGACCACGAGGACATCTCCGTT
TCTGCTCAGACCCTGAGCATCAGCAGATCCGTGTCCACCAACATGGA
CTAATAAGAGCTCGCTGATCAGCCTCGACTGTGCCTTCTAGTTGCCA
GCCATCTGTTGTTTGCCCCTCCCCCGTGCCTTCCTTGACCCTGGAAG
GTGCCACTCCCACTGTCCTTTCCTAATAAAATGAGGAAATTGCATCG
CATTGTCTGAGTAGGTGTCATTCTATTCTGGGGGGTGGGGTGGGGCA
GGACAGCAAGGGGGAGGATTGGGAAGACAATAGCAGGCATGCTGGGG
ATGCGGTGGGCTCTATGGTTAATTAAGGTCGGGCAGGAAGAGGGCCT
ATTTCCCATGATTCCTTCATATTTGCATATACGATACAAGGCTGTTA
GAGAGATAATTAGAATTAATTTGAGTGTAAACACAAAGATATTAGTA
GAAAATACGTGACGTAGAAAGTAATAATTTCTTGGGTAGTTTGCAGT
TTTAAAATTATGTTTTAAAATGGACTATCATATGCTTACCGTAACTT
GAAAGTATTTCGATTTCTTGGCTTTATATATCTTGTGGAAAGGACGA
AACACCGAAGCCGAAAACCACGATCATCGTTTAAGTACTCTGTGCTG
GAAACAGCACAGAATCTACTTAAACAAGGCAAAATGCCGTGTTTATC
TCGTCAACTTGTTGGCGAGATTTTTTCTAAAGCTTGAATTCAAGCTT
GAATTCAGCTGACGTGCCTCGGACCGCTAGGAACCCCTAGTGATGGA
GTTGGCCACTCCCTCTCTGCGCGCTCGCTCGCTCACTGAGGCCGGGC
GACCAAAGGTCGCCCGACGCCCGGGCTTTGCCCGGGCGGCCTCAGTG
AGCGAGCGAGCGCGCAGCTGCCTGCAGGGGCGCCTGATGCGGTATTT
TCTCCTTACGCATCTGTGCGGTATTTCACACCGCATACGTCAAAGCA
ACCATAGTACGCGCCCTGTAGCGGCGCATTAAGCGCGGCGGGTGTGG
TGGTTACGCGCAGCGTGACCGCTACACTTGCCAGCGCCCTAGCGCCC
GCTCCTTTCGCTTTCTTCCCTTCCTTTCTCGCCACGTTCGCCGGCTT
TCCCCGTCAAGCTCTAAATCGGGGGCTCCCTTTAGGGTTCCGATTTA
GTGCTTTACGGCACCTCGACCCCAAAAAACTTGATTTGGGTGATGGT
TCACGTAGTGGGCCATCGCCCTGATAGACGGTTTTTCGCCCTTTGAC
GTTGGAGTCCACGTTCTTTAATAGTGGACTCTTGTTCCAAACTGGAA
CAACACTCAACCCTATCTCGGGCTATTCTTTTGATTTATAAGGGATT
TTGCCGATTTCGGCCTATTGGTTAAAAAATGAGCTGATTTAACAAAA
ATTTAACGCGAATTTTAACAAAATATTAACGTTTACAATTTTATGGT
GCACTCTCAGTACAATCTGCTCTGATGCCGCATAGTTAAGCCAGCCC
CGACACCCGCCAACACCCGCTGACGCGCCCTGACGGGCTTGTCTGCT
CCCGGCATCCGCTTACAGACAAGCTGTGACCGTCTCCGGGAGCTGCA
TGTGTCAGAGGTTTTCACCGTCATCACCGAAACGCGCGAGACGAAAG
GGCCTCGTGATACGCCTATTTTTATAGGTTAATGTCATGAACAATAA
AACTGTCTGCTTACATAAACAGTAATACAAGGGGTGTTATGAGCCAT
ATTCAACGGGAAACGTCGAGGCCGCGATTAAATTCCAACATGGATGC
TGATTTATATGGGTATAAATGGGCTCGCGATAATGTCGGGCAATCAG
GTGCGACAATCTATCGCTTGTATGGGAAGCCCGATGCGCCAGAGTTG
TTTCTGAAACATGGCAAAGGTAGCGTTGCCAATGATGTTACAGATGA
GATGGTCAGACTAAACTGGCTGACGGAATTTATGCCTCTTCCGACCA
TCAAGCATTTTATCCGTACTCCTGATGATGCATGGTTACTCACCACT
GCGATCCCCGGAAAAACAGCATTCCAGGTATTAGAAGAATATCCTGA
TTCAGGTGAAAATATTGTTGATGCGCTGGCAGTGTTCCTGCGCCGGT
TGCATTCGATTCCTGTTTGTAATTGTCCTTTTAACAGCGATCGCGTA
TTTCGTCTCGCTCAGGCGCAATCACGAATGAATAACGGTTTGGTTGA
TGCGAGTGATTTTGATGACGAGCGTAATGGCTGGCCTGTTGAACAAG
TCTGGAAAGAAATGCATAAACTTTTGCCATTCTCACCGGATTCAGTC
GTCACTCATGGTGATTTCTCACTTGATAACCTTATTTTTGACGAGGG
GAAATTAATAGGTTGTATTGATGTTGGACGAGTCGGAATCGCAGACC
GATACCAGGATCTTGCCATCCTATGGAACTGCCTCGGTGAGTTTTCT
CCTTCATTACAGAAACGGCTTTTTCAAAAATATGGTATTGATAATCC
TGATATGAATAAATTGCAGTTTCATTTGATGCTCGATGAGTTTTTCT
AATCTCATGACCAAAATCCCTTAACGTGAGTTTTCGTTCCACTGAGC
GTCAGACCCCGTAGAAAAGATCAAAGGATCTTCTTGAGATCCTTTTT
TTCTGCGCGTAATCTGCTGCTTGCAAACAAAAAAACCACCGCTACCA
GCGGTGGTTTGTTTGCCGGATCAAGAGCTACCAACTCTTTTTCCGAA
GGTAACTGGCTTCAGCAGAGCGCAGATACCAAATACTGTCCTTCTAG
TGTAGCCGTAGTTAGGCCACCACTTCAAGAACTCTGTAGCACCGCCT
ACATACCTCGCTCTGCTAATCCTGTTACCAGTGGCTGCTGCCAGTGG
CGATAAGTCGTGTCTTACCGGGTTGGACTCAAGACGATAGTTACCGG
ATAAGGCGCAGCGGTCGGGCTGAACGGGGGGTTCGTGCACACAGCCC
AGCTTGGAGCGAACGACCTACACCGAACTGAGATACCTACAGCGTGA
GCTATGAGAAAGCGCCACGCTTCCCGAAGGGAGAAAGGCGGACAGGT
ATCCGGTAAGCGGCAGGGTCGGAACAGGAGAGCGCACGAGGGAGCTT
CCAGGGGGAAACGCCTGGTATCTTTATAGTCCTGTCGGGTTTCGCCA
CCTCTGACTTGAGCGTCGATTTTTGTGATGCTCGTCAGGGGGGCGGA
GCCTATGGAAAAACGCCAGCAACGCGGCCTTTTTACGGTTCCTGGCC
TTTTGCTGGCCTTTTGCTCACATGT
Exemplary pITR-CAG.hKCNQ4codop.U6-hsammu386Fw
sequence
(SEQ ID NO: 274)
CTGCGCGCTCGCTCGCTCACTGAGGCCGCCCGGGCGTCGGGCGACCT
TTGGTCGCCCGGCCTCAGTGAGCGAGCGAGCGCGCAGAGAGGGAGTG
GCCAACTCCATCACTAGGGGTTCCTGCGGCCGCACGCGTGACATTGA
TTATTGACTAGTTATTAATAGTAATCAATTACGGGGTCATTAGTTCA
TAGCCCATATATGGAGTTCCGCGTTACATAACTTACGGTAAATGGCC
CGCCTGGCTGACCGCCCAACGACCCCCGCCCATTGACGTCAATAATG
ACGTATGTTCCCATAGTAACGCCAATAGGGACTTTCCATTGACGTCA
ATGGGTGGACTATTTACGGTAAACTGCCCACTTGGCAGTACATCAAG
TGTATCATATGCCAAGTACGCCCCCTATTGACGTCAATGACGGTAAA
TGGCCCGCCTGGCATTATGCCCAGTACATGACCTTATGGGACTTTCC
TACTTGGCAGTACATCTACGTATTAGTCATCGCTATTACCATGGGTC
GAGGTGAGCCCCACGTTCTGCTTCACTCTCCCCATCTCCCCCCCCTC
CCCACCCCCAATTTTGTATTTATTTATTTTTTAATTATTTTGTGCAG
CGATGGGGGCGGGGGGGGGGGGGGCGCGCGCCAGGCGGGGCGGGGCG
GGGCGAGGGGCGGGGCGGGGCGAGGCGGAGAGGTGCGGCGGCAGCCA
ATCAGAGCGGCGCGCTCCGAAAGTTTCCTTTTATGGCGAGGCGGCGG
CGGCGGCGGCCCTATAAAAAGCGAAGCGCGCGGCGGGCGGGAGTCGC
TGCGTTGCCTTCGCCCCGTGCCCCGCTCCGCGCCGCCTCGCGCCGCC
CGCCCCGGCTCTGACTGACCGCGTTACTCCCACAGGTGAGCGGGCGG
GACGGCCCTTCTCCTCCGGGCTGTAATTAGCGCTTGGTTTAATGACG
GCTCGTTTCTTTTCTGTGGCTGCGTGAAAGCCTTAAAGGGCTCCGGG
AGGGCCCTTTGTGCGGGGGGGAGCGGCTCGGGGGGTGCGTGCGTGTG
TGTGTGCGTGGGGAGCGCCGCGTGCGGCCCGCGCTGCCCGGCGGCTG
TGAGCGCTGCGGGCGCGGCGCGGGGCTTTGTGCGCTCCGCGTGTGCG
CGAGGGGAGCGCGGCCGGGGGCGGTGCCCCGCGGTGCGGGGGGGCTG
CGAGGGGAACAAAGGCTGCGTGCGGGGTGTGTGCGTGGGGGGGTGAG
CAGGGGGTGTGGGCGCGGCGGTCGGGCTGTAACCCCCCCCTGCACCC
CCCTCCCCGAGTTGCTGAGCACGGCCCGGCTTCGGGTGCGGGGCTCC
GTGCGGGGCGTGGCGCGGGGCTCGCCGTGCCGGGCGGGGGGTGGCGG
CAGGTGGGGGTGCCGGGCGGGGCGGGGCCGCCTCGGGCCGGGGAGGG
CTCGGGGGAGGGGCGCGGCGGCCCCCGGAGCGCCGGCGGCTGTCGAG
GCGCGGCGAGCCGCAGCCATTGCCTTTTATGGTAATCGTGCGAGAGG
GCGCAGGGACTTCCTTTGTCCCAAATCTGTGCGGAGCCGAAATCTGG
GAGGCGCCGCCGCACCCCCTCTAGCGGGCGCGGGGCGAAGCGGTGCG
GCGCCGGCAGGAAGGAAATGGGCGGGGAGGGCCTTCGTGCGTCGCCG
CGCCGCCGTCCCCTTCTCCCTCTCCAGCCTCGGGGCTGTCCGCGGGG
GGACGGCTGCCTTCGGGGGGGACGGGGCAGGGCGGGGTTCGGCTTCT
GGCGTGTGACCGGCGGCTCTAGAGCCTCTGCTAACCATGTTCATGCC
TTCTTCTTTTTCCTACAGCTCCTGGGCAACGTGCTGGTTATTGTGAC
CGGTCGCTAGCCACCATGGCTGAAGCCCCTCCTAGAAGGCTTGGACT
GGGACCTCCTCCTGGGGATGCTCCTAGAGCTGAACTGGTGGCTCTGA
CAGCCGTGCAGTCTGAACAAGGCGAAGCTGGTGGCGGCGGATCTCCA
CGTAGACTTGGACTGCTGGGAAGCCCTCTTCCTCCTGGTGCTCCACT
TCCTGGACCTGGCAGTGGATCTGGATCTGCCTGTGGCCAGAGAAGCT
CTGCCGCTCACAAGAGATACCGGCGGCTGCAGAACTGGGTGTACAAC
GTGCTGGAAAGACCCAGAGGCTGGGCCTTCGTGTACCACGTGTTCAT
CTTTCTGCTGGTGTTCAGCTGCCTGGTGCTGTCCGTGCTGAGCACCA
TCCAAGAACATCAAGAGCTGGCTAACGAGTGCCTGTTAATACTGGAG
TTTGTGATGATTGTGGTGTTCGGCCTCGAGTACATCGTCCGCGTTTG
GAGCGCCGGCTGCTGCTGCAGATATAGAGGTTGGCAAGGCAGATTCC
GCTTCGCCAGAAAGCCCTTCTGCGTGATCGACTTCATCGTGTTCGTG
GCCAGCGTGGCCGTGATTGCTGCTGGCACACAGGGCAACATCTTCGC
CACAAGCGCCCTGCGGAGCATGCGGTTTCTGCAGATCCTGAGAATGG
TCCGAATGGACAGAAGAGGCGGCACCTGGAAGCTGCTGGGCTCTGTG
GTGTACGCCCACAGCAAAGAGCTGATCACCGCCTGGTACATCGGATT
TCTGGTGCTGATCTTCGCCTCCTTCCTGGTGTACCTGGCCGAGAAGG
ACGCCAACAGCGACTTTAGCAGCTACGCCGACTCTCTTTGGTGGGGC
ACCATCACACTGACCACCATCGGCTACGGCGACAAGACCCCTCACAC
ATGGCTGGGAAGAGTGCTGGCCGCTGGATTTGCTCTGCTGGGCATCA
GCTTTTTCGCCCTGCCTGCCGGAATCCTCGGATCTGGCTTTGCCCTG
AAGGTGCAAGAGCAGCACCGGCAGAAGCACTTCGAGAAGAGAAGAAT
GCCTGCCGCCAACCTGATTCAGGCCGCTTGGAGACTGTACAGCACCG
ACATGAGCAGAGCCTACCTGACCGCCACGTGGTATTATTACGACTCG
ATCCTGCCTAGCTTCCGCGAACTGGCCCTGCTGTTTGAGCATGTGCA
GAGAGCCAGAAACGGCGGCCTCAGACCTCTGGAAGTTCGGAGAGCAC
CTGTGCCTGATGGCGCCCCTTCTAGATATCCTCCAGTGGCCACCTGT
CACAGACCCGGCAGCACATCTTTTTGCCCTGGCGAGTCTAGCCGGAT
GGGCATCAAGGACAGAATCAGAATGGGCAGCAGCCAGCGGAGAACAG
GCCCTTCTAAACAGCATCTGGCCCCTCCAACCATGCCTACAAGCCCT
AGCTCTGAGCAAGTGGGCGAAGCCACCTCTCCTACCAAGGTGCAGAA
GTCCTGGTCCTTCAACGACCGGACCAGATTCAGAGCCAGCCTGAGAC
TGAAGCCCAGAACCTCTGCCGAGGATGCCCCTTCTGAAGAGGTGGCC
GAAGAGAAGTCCTACCAGTGCGAGCTGACCGTGGACGACATCATGCC
AGCCGTGAAAACCGTGATACGGTCTATCCGGATCCTGAAGTTCCTGG
TGGCCAAGCGGAAGTTCAAAGAGACACTGCGGCCCTACGACGTGAAG
GACGTGATCGAGCAGTATTCTGCCGGCCACCTGGACATGCTGGGCAG
AATCAAGAGCCTGCAGACCAGAGTGGACCAGATCGTTGGAAGAGGCC
CAGGCGACAGAAAGGCCAGAGAGAAGGGCGATAAGGGCCCATCTGAT
GCCGAGGTTGTCGACGAGATATCAATGATGGGCAGAGTGGTCAAGGT
GGAAAAACAGGTGCAGAGCATCGAGCACAAGCTGGACCTGCTGCTGG
GATTCTACAGCCGGTGTCTGAGAAGCGGCACATCTGCATCTCTGGGC
GCTGTGCAGGTCCCACTGTTCGACCCTGATATCACCAGCGACTATCA
CAGCCCCGTGGACCACGAGGACATCTCCGTTTCTGCTCAGACCCTGA
GCATCAGCAGATCCGTGTCCACCAACATGGACTAATAAGAGCTCGCT
GATCAGCCTCGACTGTGCCTTCTAGTTGCCAGCCATCTGTTGTTTGC
CCCTCCCCCGTGCCTTCCTTGACCCTGGAAGGTGCCACTCCCACTGT
CCTTTCCTAATAAAATGAGGAAATTGCATCGCATTGTCTGAGTAGGT
GTCATTCTATTCTGGGGGGTGGGGTGGGGCAGGACAGCAAGGGGGAG
GATTGGGAAGACAATAGCAGGCATGCTGGGGATGCGGTGGGCTCTAT
GGTTAATTAAGGTCGGGCAGGAAGAGGGCCTATTTCCCATGATTCCT
TCATATTTGCATATACGATACAAGGCTGTTAGAGAGATAATTAGAAT
TAATTTGACTGTAAACACAAAGATATTAGTACAAAATACGTGACGTA
GAAAGTAATAATTTCTTGGGTAGTTTGCAGTTTTAAAATTATGTTTT
AAAATGGACTATCATATGCTTACCGTAACTTGAAAGTATTTCGATTT
CTTGGCTTTATATATCTTGTGGAAAGGACGAAACACCGAGGAGCACC
AGGAACTTGCCAGTTTAAGTACTCTGTGCTGGAAACAGCACAGAATC
TACTTAAACAAGGCAAAATGCCGTGTTTATCTCGTCAACTTGTTGGC
GAGATTTTTTCTAAAGCTTGAATTCAAGCTTGAATTCAGCTGACGTG
CCTCGGACCGCTAGGAACCCCTAGTGATGGAGTTGGCCACTCCCTCT
CTGCGCGCTCGCTCGCTCACTGAGGCCGGGCGACCAAAGGTCGCCCG
ACGCCCGGGCTTTGCCCGGGCGGCCTCAGTGAGCGAGCGAGCGCGCA
G
Exemplary pITR-CAG.hKCNQ4codop.U6-mmu408Rev
sequence
(SEQ ID NO: 275)
CTGCGCGCTCGCTCGCTCACTGAGGCCGCCCGGGCGTCGGGCGACCT
TTGGTCGCCCGGCCTCAGTGAGCGAGCGAGCGCGCAGAGAGGGAGTG
GCCAACTCCATCACTAGGGGTTCCTGCGGCCGCACGCGTGACATTGA
TTATTGACTAGTTATTAATAGTAATCAATTACGGGGTCATTAGTTCA
TAGCCCATATATGGAGTTCCGCGTTACATAACTTACGGTAAATGGCC
CGCCTGGCTGACCGCCCAACGACCCCCGCCCATTGACGTCAATAATG
ACGTATGTTCCCATAGTAACGCCAATAGGGACTTTCCATTGACGTCA
ATGGGTGGACTATTTACGGTAAACTGCCCACTTGGCAGTACATCAAG
TGTATCATATGCCAAGTACGCCCCCTATTGACGTCAATGACGGTAAA
TGGCCCGCCTGGCATTATGCCCAGTACATGACCTTATGGGACTTTCC
TACTTGGCAGTACATCTACGTATTAGTCATCGCTATTACCATGGGTC
GAGGTGAGCCCCACGTTCTGCTTCACTCTCCCCATCTCCCCCCCCTC
CCCACCCCCAATTTTGTATTTATTTATTTTTTAATTATTTTGTGCAG
CGATGGGGGCGGGGGGGGGGGGGGCGCGCGCCAGGCGGGGCGGGGCG
GGGCGAGGGGCGGGGCGGGGCGAGGCGGAGAGGTGCGGCGGCAGCCA
ATCAGAGCGGCGCGCTCCGAAAGTTTCCTTTTATGGCGAGGCGGCGG
CGGCGGCGGCCCTATAAAAAGCGAAGCGCGCGGCGGGCGGGAGTCGC
TGCGTTGCCTTCGCCCCGTGCCCCGCTCCGCGCCGCCTCGCGCCGCC
CGCCCCGGCTCTGACTGACCGCGTTACTCCCACAGGTGAGCGGGCGG
GACGGCCCTTCTCCTCCGGGCTGTAATTAGCGCTTGGTTTAATGACG
GCTCGTTTCTTTTCTGTGGCTGCGTGAAAGCCTTAAAGGGCTCCGGG
AGGGCCCTTTGTGCGGGGGGGAGCGGCTCGGGGGGTGCGTGCGTGTG
TGTGTGCGTGGGGAGCGCCGCGTGCGGCCCGCGCTGCCCGGCGGCTG
TGAGCGCTGCGGGCGCGGCGCGGGGCTTTGTGCGCTCCGCGTGTGCG
CGAGGGGAGCGCGGCCGGGGGCGGTGCCCCGCGGTGCGGGGGGGCTG
CGAGGGGAACAAAGGCTGCGTGCGGGGTGTGTGCGTGGGGGGGTGAG
CAGGGGGTGTGGGCGCGGCGGTCGGGCTGTAACCCCCCCCTGCACCC
CCCTCCCCGAGTTGCTGAGCACGGCCCGGCTTCGGGTGCGGGGCTCC
GTGCGGGGCGTGGCGCGGGGCTCGCCGTGCCGGGCGGGGGGTGGCGG
CAGGTGGGGGTGCCGGGCGGGGCGGGGCCGCCTCGGGCCGGGGAGGG
CTCGGGGGAGGGGCGCGGCGGCCCCCGGAGCGCCGGCGGCTGTCGAG
GCGCGGCGAGCCGCAGCCATTGCCTTTTATGGTAATCGTGCGAGAGG
GCGCAGGGACTTCCTTTGTCCCAAATCTGTGCGGAGCCGAAATCTGG
GAGGCGCCGCCGCACCCCCTCTAGCGGGCGCGGGGCGAAGCGGTGCG
GCGCCGGCAGGAAGGAAATGGGCGGGGAGGGCCTTCGTGCGTCGCCG
CGCCGCCGTCCCCTTCTCCCTCTCCAGCCTCGGGGCTGTCCGCGGGG
GGACGGCTGCCTTCGGGGGGGACGGGGCAGGGCGGGGTTCGGCTTCT
GGCGTGTGACCGGCGGCTCTAGAGCCTCTGCTAACCATGTTCATGCC
TTCTTCTTTTTCCTACAGCTCCTGGGCAACGTGCTGGTTATTGTGAC
CGGTCGCTAGCCACCATGGCTGAAGCCCCTCCTAGAAGGCTTGGACT
GGGACCTCCTCCTGGGGATGCTCCTAGAGCTGAACTGGTGGCTCTGA
CAGCCGTGCAGTCTGAACAAGGCGAAGCTGGTGGCGGCGGATCTCCA
CGTAGACTTGGACTGCTGGGAAGCCCTCTTCCTCCTGGTGCTCCACT
TCCTGGACCTGGCAGTGGATCTGGATCTGCCTGTGGCCAGAGAAGCT
CTGCCGCTCACAAGAGATACCGGCGGCTGCAGAACTGGGTGTACAAC
GTGCTGGAAAGACCCAGAGGCTGGGCCTTCGTGTACCACGTGTTCAT
CTTTCTGCTGGTGTTCAGCTGCCTGGTGCTGTCCGTGCTGAGCACCA
TCCAAGAACATCAAGAGCTGGCTAACGAGTGCCTGTTAATACTGGAG
TTTGTGATGATTGTGGTGTTCGGCCTCGAGTACATCGTCCGCGTTTG
GAGCGCCGGCTGCTGCTGCAGATATAGAGGTTGGCAAGGCAGATTCC
GCTTCGCCAGAAAGCCCTTCTGCGTGATCGACTTCATCGTGTTCGTG
GCCAGCGTGGCCGTGATTGCTGCTGGCACACAGGGCAACATCTTCGC
CACAAGCGCCCTGCGGAGCATGCGGTTTCTGCAGATCCTGAGAATGG
TCCGAATGGACAGAAGAGGCGGCACCTGGAAGCTGCTGGGCTCTGTG
GTGTACGCCCACAGCAAAGAGCTGATCACCGCCTGGTACATCGGATT
TCTGGTGCTGATCTTCGCCTCCTTCCTGGTGTACCTGGCCGAGAAGG
ACGCCAACAGCGACTTTAGCAGCTACGCCGACTCTCTTTGGTGGGGC
ACCATCACACTGACCACCATCGGCTACGGCGACAAGACCCCTCACAC
ATGGCTGGGAAGAGTGCTGGCCGCTGGATTTGCTCTGCTGGGCATCA
GCTTTTTCGCCCTGCCTGCCGGAATCCTCGGATCTGGCTTTGCCCTG
AAGGTGCAAGAGCAGCACCGGCAGAAGCACTTCGAGAAGAGAAGAAT
GCCTGCCGCCAACCTGATTCAGGCCGCTTGGAGACTGTACAGCACCG
ACATGAGCAGAGCCTACCTGACCGCCACGTGGTATTATTACGACTCG
ATCCTGCCTAGCTTCCGCGAACTGGCCCTGCTGTTTGAGCATGTGCA
GAGAGCCAGAAACGGCGGCCTCAGACCTCTGGAAGTTCGGAGAGCAC
CTGTGCCTGATGGCGCCCCTTCTAGATATCCTCCAGTGGCCACCTGT
CACAGACCCGGCAGCACATCTTTTTGCCCTGGCGAGTCTAGCCGGAT
GGGCATCAAGGACAGAATCAGAATGGGCAGCAGCCAGCGGAGAACAG
GCCCTTCTAAACAGCATCTGGCCCCTCCAACCATGCCTACAAGCCCT
AGCTCTGAGCAAGTGGGCGAAGCCACCTCTCCTACCAAGGTGCAGAA
GTCCTGGTCCTTCAACGACCGGACCAGATTCAGAGCCAGCCTGAGAC
TGAAGCCCAGAACCTCTGCCGAGGATGCCCCTTCTGAAGAGGTGGCC
GAAGAGAAGTCCTACCAGTGCGAGCTGACCGTGGACGACATCATGCC
AGCCGTGAAAACCGTGATACGGTCTATCCGGATCCTGAAGTTCCTGG
TGGCCAAGCGGAAGTTCAAAGAGACACTGCGGCCCTACGACGTGAAG
GACGTGATCGAGCAGTATTCTGCCGGCCACCTGGACATGCTGGGCAG
AATCAAGAGCCTGCAGACCAGAGTGGACCAGATCGTTGGAAGAGGCC
CAGGCGACAGAAAGGCCAGAGAGAAGGGCGATAAGGGCCCATCTGAT
GCCGAGGTTGTCGACGAGATATCAATGATGGGCAGAGTGGTCAAGGT
GGAAAAACAGGTGCAGAGCATCGAGCACAAGCTGGACCTGCTGCTGG
GATTCTACAGCCGGTGTCTGAGAAGCGGCACATCTGCATCTCTGGGC
GCTGTGCAGGTCCCACTGTTCGACCCTGATATCACCAGCGACTATCA
CAGCCCCGTGGACCACGAGGACATCTCCGTTTCTGCTCAGACCCTGA
GCATCAGCAGATCCGTGTCCACCAACATGGACTAATAAGAGCTCGCT
GATCAGCCTCGACTGTGCCTTCTAGTTGCCAGCCATCTGTTGTTTGC
CCCTCCCCCGTGCCTTCCTTGACCCTGGAAGGTGCCACTCCCACTGT
CCTTTCCTAATAAAATGAGGAAATTGCATCGCATTGTCTGAGTAGGT
GTCATTCTATTCTGGGGGGTGGGGTGGGGCAGGACAGCAAGGGGGAG
GATTGGGAAGACAATAGCAGGCATGCTGGGGATGCGGTGGGCTCTAT
GGTTAATTAAGGTCGGGCAGGAAGAGGGCCTATTTCCCATGATTCCT
TCATATTTGCATATACGATACAAGGCTGTTAGAGAGATAATTAGAAT
TAATTTGACTGTAAACACAAAGATATTAGTACAAAATACGTGACGTA
GAAAGTAATAATTTCTTGGGTAGTTTGCAGTTTTAAAATTATGTTTT
AAAATGGACTATCATATGCTTACCGTAACTTGAAAGTATTTCGATTT
CTTGGCTTTATATATCTTGTGGAAAGGACGAAACACCGAAGCCAAAG
ACCACAATCATCGTTTAAGTACTCTGTGCTGGAAACAGCACAGAATC
TACTTAAACAAGGCAAAATGCCGTGTTTATCTCGTCAACTTGTTGGC
GAGATTTTTTCTAAAGCTTGAATTCAAGCTTGAATTCAGCTGACGTG
CCTCGGACCGCTAGGAACCCCTAGTGATGGAGTTGGCCACTCCCTCT
CTGCGCGCTCGCTCGCTCACTGAGGCCGGGCGACCAAAGGTCGCCCG
ACGCCCGGGCTTTGCCCGGGCGGCCTCAGTGAGCGAGCGAGCGCGCA
G

[0373] Exemplary Base Cas9 Plasmids

Exemplary pITR.CMVEnhProm-SaCas9_CRISPRi
sequence
(SEQ ID NO: 276)
CTGCGCGCTCGCTCGCTCACTGAGGCCGCCCGGGCGTCGGGCGACCT
TTGGTCGCCCGGCCTCAGTGAGCGAGCGAGCGCGCAGAGAGGGAGTG
GCCAACTCCATCACTAGGGGTTCCTGCGGCCGCACGCGTCGTTACAT
AACTTACGGTAAATGGCCCGCCTGGCTGACCGCCCAACGACCCCCGC
CCATTGAGGTCAATAATGAGGTATGTTCCCATAGTAACGCCAATAGG
GAGTTTCCATTGAGGTCAATGGGTGGAGTATTTACGGTAAACTGCCC
ACTTGGCAGTACATCAAGTGTATCATATGCCAAGTACGCCCCCTATT
GACGTCAATGACGGTAAATGGCCCGCCTGGCATTATGCCCAGTACAT
GACCTTATGGGACTTTCCTACTTGGCAGTACATCTACGTATTAGTCA
TCGCTATTACCATGGTGATGCGGTTTTGGCAGTACATCAATGGGCGT
GGATAGCGGTTTGACTCACGGGGATTTCCAAGTCTCCACCCCATTGA
CGTCAATGGGAGTTTGTTTTGGCACCAAAATCAACGGGACTTTCCAA
AATGTCGTAACAACTCCGCCCCATTGACGCAAATGGGCGGTAGGCGT
GTACGGTGGGAGGTCTATATAAGCAGAGCTCGTTTAGTGAACCGTca
gatcgcctggagacgcACCGGTGCCACCATGGCCCCTAAGAAGAAGC
GGAAAGTCGGCAGCGGCAAGCGGAACTATATCCTGGGCCTCGCCATC
GGCATCACCAGCGTTGGCTACGGCATCATCGACTACGAGACACGGGA
CGTGATCGATGCCGGCGTGCGGCTGTTTAAAGAGGCCAACGTCGAGA
ACAACGAGGGCCGCAGATCTAAGAGAGGCGCCAGACGGCTGAAGCGG
AGAAGAAGGCACAGAATCCAGAGAGTGAAGAAGCTGCTGTTCGACTA
CAACCTGCTGACCGACCACAGCGAGCTGAGCGGCATCAATCCTTACG
AGGCCAGAGTGAAGGGCCTGAGCCAGAAGCTGAGCGAGGAAGAGTTT
AGCGCCGCTCTGCTGCACCTGGCCAAGAGAAGAGGCGTGCACAACGT
GAACGAGGTGGAAGAGGACACCGGCAACGAGCTGTCCACCAAAGAGC
AGATCAGCCGGAACAGCAAGGCCCTGGAAGAGAAATACGTGGCCGAA
CTGCAGCTGGAACGGCTGAAAAAGGATGGCGAAGTGCGGGGCAGCAT
CAATCGGTTCAAGACCAGCGACTACGTGAAAGAAGCCAAACAGCTGC
TGAAGGTGCAGAAGGCCTACCACCAGCTGGACCAGAGCTTCATCGAC
ACCTACATCGACCTGCTGGAAACCCGGCGGACCTACTATGAAGGACC
TGGCGAGGGAAGCCCCTTCGGCTGGAAGGACATCAAAGAATGGTACG
AGATGCTGATGGGCCACTGCACCTACTTTCCCGAGGAACTGCGGAGC
GTGAAGTACGCCTACAACGCCGACCTGTACAACGCCCTGAACGACCT
GAACAACCTCGTGATCACCCGGGACGAGAACGAGAAGCTGGAATATT
AGGAGAAGTTCCAGATCATCGAGAACGTGTTCAAGCAGAAGAAGAAA
CCCACGCTGAAGCAGATCGCCAAAGAGATCCTGGTCAACGAGGAAGA
TATCAAGGGCTACAGAGTGACCAGCACCGGCAAGCCCGAGTTCACCA
ACCTGAAGGTGTACCACGACATCAAGGATATCACAGCCCGGAAAGAG
ATTATTGAGAACGCCGAGCTGCTGGACCAAATCGCCAAGATCCTGAC
CATCTACCAGAGCAGCGAGGACATCCAAGAGGAACTGACCAATCTGA
ACTCCGAGCTGACCCAAGAAGAGATCGAGCAGATCTCTAATCTGAAG
GGGTACACCGGCACACACAACCTGAGCCTGAAGGCCATCAACCTGAT
CCTGGACGAGCTGTGGCACACCAACGACAACCAGATTGCCATCTTCA
ACAGGCTGAAGCTGGTGCCCAAGAAGGTGGACCTGTCTCAGCAGAAA
GAAATCCCCACCACACTGGTGGACGACTTCATTCTGAGCCCCGTGGT
CAAGAGGAGCTTCATCCAGAGCATCAAAGTGATCAACGCCATCATCA
AGAAGTACGGGCTGCCCAACGATATCATCATCGAGCTGGCCCGCGAG
AAGAACTCCAAGGACGCCCAGAAAATGATCAACGAGATGCAGAAGAG
GAACCGCCAGACCAACGAGCGGATCGAGGAAATCATCCGGACCACCG
GCAAAGAGAACGCCAAGTACCTGATCGAGAAGATCAAGCTGCACGAC
ATGCAAGAGGGCAAGTGCCTGTACAGCCTGGAAGCCATTCCTCTGGA
AGATCTGCTGAACAATCCCTTCAACTATGAGGTGGACCACATCATCC
CCAGAAGCGTGTCCTTCGACAACAGCTTCAACAACAAGGTGCTCGTG
AAGCAAGAGGAAGCCAGCAAGAAGGGCAACAGAACCCCATTCCAGTA
CCTGAGCAGCAGCGACAGCAAGATCAGCTACGAAACCTTCAAGAAGC
ACATCCTGAATCTGGCCAAAGGCAAGGGCAGAATCAGCAAGACCAAG
AAAGAATACCTGCTCGAGGAACGGGACATCAACAGATTCAGCGTGCA
GAAAGACTTCATCAATCGGAACCTGGTGGACACCAGATACGCCACCA
GAGGCCTGATGAATCTGCTGCGGAGCTACTTCAGAGTGAACAATCTG
GACGTGAAAGTCAAGTCCATCAACGGCGGCTTCACCAGCTTTCTGCG
GCGGAAGTGGAAGTTCAAGAAAGAGCGGAACAAGGGCTATAAGCACC
ACGCCGAGGACGCCCTGATCATTGCCAACGCCGATTTCATCTTCAAA
GAGTGGAAGAAACTGGACAAGGCCAAAAAAGTGATGGAAAACCAGAT
GTTCGAGGAAAAGCAGGCCGAGAGCATGCCCGAGATCGAAACCGAGC
AAGAGTACAAAGAGATTTTCATCACGCCCCACCAGATCAAGCACATT
AAGGACTTCAAGGACTACAAGTACAGCCACCGCGTGGACAAGAAGCC
CAATAGAGAGCTGATTAACGACACCCTGTACTCTACCCGGAAGGACG
ACAAGGGCAATACCCTGATCGTCAACAACCTGAACGGCCTGTACGAC
AAGGACAACGACAAGCTCAAGAAGCTGATCAACAAGAGCCCCGAGAA
ACTGCTGATGTACCACCACGATCCTCAGACCTACCAGAAACTGAAGC
TCATCATGGAACAGTACGGCGACGAGAAGAATCCCCTGTAGAAGTAG
TAGGAGGAAACCGGGAACTACCTGACCAAGTACTCCAAAAAGGACAA
TGGGCCCGTGATCAAGAAGATTAAGTATTACGGCAACAAGCTGAATG
CCCACCTGGACATCACCGACGACTACCCCAACAGCAGAAACAAGGTG
GTCAAGCTGTCCCTGAAGCCTTACAGATTCGACGTGTACCTGGACAA
CGGCGTGTACAAGTTCGTGACCGTGAAGAACCTGGACGTCATCAAAA
AAGAAAACTAGTAGGAAGTCAACAGCAAGTGCTATGAGGAAGCCAAG
AAACTCAAGAAAATCAGCAACCAGGCCGAGTTTATCGCCTCCTTCTA
CAACAACGATCTGATCAAGATCAACGGGGAGCTGTATAGAGTGATCG
GCGTGAACAATGACCTGCTGAACCGGATCGAAGTGAACATGATCGAC
ATCACCTACCGCGAGTACCTCGAGAACATGAACGATAAGCGGCCTCC
ACGGATCATTAAGACAATCGCCAGCAAGACGCAGAGCATTAAGAAGT
ACAGCACAGACATCCTGGGCAACCTGTACGAAGTGAAGTCTAAGAAG
CACCCGCAGATTATCAAGAAAGGCAGCGGCGCTCCCAAGAAAAAACG
GAAGGTTTAAGAGCTCGCTGATCAGCCTCGATAAGATACATTGATGA
GTTTGGACAAACCACAACTAGAATGCAGTGAAAAAAATGCTTTATTT
GTGAAATTTGTGATGCTATTGCTTTATTTGTAACCATTATAAGCTGC
AATAAACAAGTTAAGCTTGAATTCAGCTGACGTGCCTCGGACCGCTA
GGAACCCCTAGTGATGGAGTTGGCCACTCCCTCTCTGCGCGCTCGCT
CGCTCACTGAGGCCGGGCGACCAAAGGTCGCCCGACGCCCGGGCTTT
GCCCGGGCGGCCTCAGTGAGCGAGCGAGCGCGCAG
Exemplary pITR.CMV-SaCas9_CRISPRi
sequence
(SEQ ID NO: 277)
CTGCGCGCTCGCTCGCTCACTGAGGCCGCCCGGGCGTCGGGCGACCT
TTGGTCGCCCGGCCTCAGTGAGCGAGCGAGCGCGCAGAGAGGGAGTG
GCCAACTCCATCACTAGGGGTTCCTGCGGCCGCACGCGTGTGATGCG
GTTTTGGCAGTACATCAATGGGCGTGGATAGCGGTTTGACTCACGGG
GATTTCCAAGTCTCCACCCCATTGACGTCAATGGGAGTTTGTTTTGG
CACCAAAATCAACGGGACTTTCCAAAATGTCGTAACAACTCCGCCCC
ATTGACGCAAATGGGCGGTAGGCGTGTACGGTGGGAGGTCTATATAA
GCAGAGCTCGTTTAGTGAACCGTcagatcgcctggagacgcACCGGT
GCCACCATGGCCCCTAAGAAGAAGCGGAAAGTCGGCAGCGGCAAGCG
GAACTATATCCTGGGCCTCGCCATCGGCATCACCAGCGTTGGCTACG
GCATCATCGACTACGAGACACGGGACGTGATCGATGCCGGCGTGCGG
CTGTTTAAAGAGGCCAACGTCGAGAACAACGAGGGCCGCAGATCTAA
GAGAGGCGCCAGACGGCTGAAGCGGAGAAGAAGGCACAGAATCCAGA
GAGTGAAGAAGCTGCTGTTCGACTACAACCTGCTGACCGACCACAGC
GAGCTGAGCGGCATCAATCCTTACGAGGCCAGAGTGAAGGGCCTGAG
CCAGAAGCTGAGCGAGGAAGAGTTTAGCGCCGCTCTGCTGCACCTGG
CCAAGAGAAGAGGCGTGCACAACGTGAACGAGGTGGAAGAGGACACC
GGCAACGAGCTGTCCACCAAAGAGCAGATCAGCCGGAACAGCAAGGC
CCTGGAAGAGAAATACGTGGCCGAACTGCAGCTGGAACGGCTGAAAA
AGGATGGCGAAGTGCGGGGCAGCATCAATCGGTTCAAGACCAGCGAC
TACGTGAAAGAAGCCAAACAGCTGCTGAAGGTGCAGAAGGCCTACCA
CCAGCTGGACCAGAGCTTCATCGACACCTACATCGACCTGCTGGAAA
CCCGGCGGACCTACTATGAAGGACCTGGCGAGGGAAGCCCCTTCGGC
TGGAAGGACATCAAAGAATGGTACGAGATGCTGATGGGCCACTGCAC
CTACTTTCCCGAGGAACTGCGGAGCGTGAAGTACGCCTACAACGCCG
ACCTGTACAACGCCCTGAACGACCTGAACAACCTCGTGATCACCCGG
GACGAGAACGAGAAGCTGGAATATTAGGAGAAGTTCCAGATCATCGA
GAACGTGTTCAAGCAGAAGAAGAAACCCACGCTGAAGCAGATCGCCA
AAGAGATCCTGGTCAACGAGGAAGATATCAAGGGCTACAGAGTGACC
AGCACCGGCAAGCCCGAGTTCACCAACCTGAAGGTGTACCACGACAT
CAAGGATATCACAGCCCGGAAAGAGATTATTGAGAACGCCGAGCTGC
TGGACCAAATCGCCAAGATCCTGACCATCTACCAGAGCAGCGAGGAC
ATCCAAGAGGAACTGACCAATCTGAACTCCGAGCTGACCCAAGAAGA
GATCGAGCAGATCTCTAATCTGAAGGGGTACACCGGCACACACAACC
TGAGCCTGAAGGCCATCAACCTGATCCTGGACGAGCTGTGGCACACC
AACGACAACCAGATTGCCATCTTCAACAGGCTGAAGCTGGTGCCCAA
GAAGGTGGACCTGTCTCAGCAGAAAGAAATCCCCACCACACTGGTGG
ACGACTTCATTCTGAGCCCCGTGGTCAAGAGGAGCTTCATCCAGAGC
ATCAAAGTGATCAACGCCATCATCAAGAAGTACGGGCTGCCCAACGA
TATCATCATCGAGCTGGCCCGCGAGAAGAACTCCAAGGACGCCCAGA
AAATGATCAACGAGATGCAGAAGAGGAACCGCCAGACCAACGAGCGG
ATCGAGGAAATCATCCGGACCACCGGCAAAGAGAACGCCAAGTACCT
GATCGAGAAGATCAAGCTGCACGACATGCAAGAGGGCAAGTGCCTGT
ACAGCCTGGAAGCCATTCCTCTGGAAGATCTGCTGAACAATCCCTTC
AACTATGAGGTGGACCACATCATCCCCAGAAGCGTGTCCTTCGACAA
CAGCTTCAACAACAAGGTGCTCGTGAAGCAAGAGGAAGCCAGCAAGA
AGGGCAACAGAACCCCATTCCAGTACCTGAGCAGCAGCGACAGCAAG
ATCAGCTACGAAACCTTCAAGAAGCACATCCTGAATCTGGCCAAAGG
CAAGGGCAGAATCAGCAAGACCAAGAAAGAATACCTGCTCGAGGAAC
GGGACATCAACAGATTCAGCGTGCAGAAAGACTTCATCAATCGGAAC
CTGGTGGACACCAGATACGCCACCAGAGGCCTGATGAATCTGCTGCG
GAGCTACTTCAGAGTGAACAATCTGGACGTGAAAGTCAAGTCCATCA
ACGGCGGCTTCACCAGCTTTCTGCGGCGGAAGTGGAAGTTCAAGAAA
GAGCGGAACAAGGGCTATAAGCACCACGCCGAGGACGCCCTGATCAT
TGCCAACGCCGATTTCATCTTCAAAGAGTGGAAGAAACTGGACAAGG
CCAAAAAAGTGATGGAAAACCAGATGTTCGAGGAAAAGCAGGCCGAG
AGCATGCCCGAGATCGAAACCGAGCAAGAGTACAAAGAGATTTTCAT
CACGCCCCACCAGATCAAGCACATTAAGGACTTCAAGGACTACAAGT
ACAGCCACCGCGTGGACAAGAAGCCCAATAGAGAGCTGATTAACGAC
ACCCTGTACTCTACCCGGAAGGACGACAAGGGCAATACCCTGATCGT
CAACAACCTGAACGGCCTGTACGACAAGGACAACGACAAGCTCAAGA
AGCTGATCAACAAGAGCCCCGAGAAACTGCTGATGTACCACCACGAT
CCTCAGACCTACCAGAAACTGAAGCTCATCATGGAACAGTACGGCGA
CGAGAAGAATCCCCTGTACAAGTACTACGAGGAAACCGGGAACTACC
TGACCAAGTACTCCAAAAAGGACAATGGGCCCGTGATCAAGAAGATT
AAGTATTACGGCAACAAGCTGAATGCCCACCTGGACATCACCGACGA
CTACCCCAACAGCAGAAACAAGGTGGTCAAGCTGTCCCTGAAGCCTT
ACAGATTCGACGTGTACCTGGACAACGGCGTGTACAAGTTCGTGACC
GTGAAGAACCTGGACGTCATCAAAAAAGAAAACTACTACGAAGTCAA
CAGCAAGTGCTATGAGGAAGCCAAGAAACTCAAGAAAATCAGCAACC
AGGCCGAGTTTATCGCCTCCTTCTACAACAACGATCTGATCAAGATC
AACGGGGAGCTGTATAGAGTGATCGGCGTGAACAATGACCTGCTGAA
CCGGATCGAAGTGAACATGATCGACATCACCTACCGCGAGTACCTCG
AGAACATGAACGATAAGCGGCCTCCACGGATCATTAAGACAATCGCC
AGCAAGACGCAGAGCATTAAGAAGTACAGCACAGACATCCTGGGCAA
CCTGTACGAAGTGAAGTCTAAGAAGCACCCGCAGATTATCAAGAAAG
GCAGCGGCGCTCCCAAGAAAAAACGGAAGGTTTAAGAGCTCGCTGAT
CAGCCTCGATAAGATACATTGATGAGTTTGGACAAACCACAACTAGA
ATGCAGTGAAAAAAATGCTTTATTTGTGAAATTTGTGATGCTATTGC
TTTATTTGTAACCATTATAAGCTGCAATAAACAAGTTAAGCTTGAAT
TCAGCTGACGTGCCTCGGACCGCTAGGAACCCCTAGTGATGGAGTTG
GCCACTCCCTCTCTGCGCGCTCGCTCGCTCACTGAGGCCGGGCGACC
AAAGGTCGCCCGACGCCCGGGCTTTGCCCGGGCGGCCTCAGTGAGCG
AGCGAGCGCGCAG
Exemplary pITR.CMVEnhProm.SaCas9
sequence
(SEQ ID NO: 278)
CTGCGCGCTCGCTCGCTCACTGAGGCCGCCCGGGCGTCGGGCGACCT
TTGGTCGCCCGGCCTCAGTGAGCGAGCGAGCGCGCAGAGAGGGAGTG
GCCAACTCCATCACTAGGGGTTCCTGCGGCCGCACGCGTCGTTACAT
AACTTACGGTAAATGGCCCGCCTGGCTGACCGCCCAACGACCCCCGC
CCATTGACGTCAATAATGACGTATGTTCCCATAGTAACGCCAATAGG
GACTTTCCATTGACGTCAATGGGTGGAGTATTTACGGTAAACTGCCC
ACTTGGCAGTACATCAAGTGTATCATATGCCAAGTACGCCCCCTATT
GACGTCAATGACGGTAAATGGCCCGCCTGGCATTATGCCCAGTACAT
GACCTTATGGGACTTTCCTACTTGGCAGTACATCTACGTATTAGTCA
TCGCTATTACCATGGTGATGCGGTTTTGGCAGTACATCAATGGGCGT
GGATAGCGGTTTGACTCACGGGGATTTCCAAGTCTCCACCCCATTGA
CGTCAATGGGAGTTTGTTTTGGCACCAAAATCAACGGGACTTTCCAA
AATGTCGTAACAACTCCGCCCCATTGACGCAAATGGGCGGTAGGCGT
GTACGGTGGGAGGTCTATATAAGCAGAGCTCGTTTAGTGAACCGTca
gatcgcctggagacgcACCGGTGCCACCATGGCCCCTAAGAAGAAGC
GGAAAGTCGGCAGCGGCAAGCGGAACTATATCCTGGGCCTCGACATC
GGCATCACCAGCGTTGGCTACGGCATCATCGACTACGAGACACGGGA
CGTGATCGATGCCGGCGTGCGGCTGTTTAAAGAGGCCAACGTCGAGA
ACAACGAGGGCCGCAGATCTAAGAGAGGCGCCAGACGGCTGAAGCGG
AGAAGAAGGCACAGAATCCAGAGAGTGAAGAAGCTGCTGTTCGACTA
CAACCTGCTGACCGACCACAGCGAGCTGAGCGGCATCAATCCTTACG
AGGCCAGAGTGAAGGGCCTGAGCCAGAAGCTGAGCGAGGAAGAGTTT
AGCGCCGCTCTGCTGCACCTGGCCAAGAGAAGAGGCGTGCACAACGT
GAACGAGGTGGAAGAGGACACCGGCAACGAGCTGTCCACCAAAGAGC
AGATCAGCCGGAACAGCAAGGCCCTGGAAGAGAAATACGTGGCCGAA
CTGCAGCTGGAACGGCTGAAAAAGGATGGCGAAGTGCGGGGCAGCAT
CAATCGGTTCAAGACCAGCGACTACGTGAAAGAAGCCAAACAGCTGC
TGAAGGTGCAGAAGGCCTACCACCAGCTGGACCAGAGCTTCATCGAC
ACCTACATCGACCTGCTGGAAACCCGGCGGACCTACTATGAAGGACC
TGGCGAGGGAAGCCCCTTCGGCTGGAAGGACATCAAAGAATGGTACG
AGATGCTGATGGGCCACTGCACCTACTTTCCCGAGGAACTGCGGAGC
GTGAAGTACGCCTACAACGCCGACCTGTACAACGCCCTGAACGACCT
GAACAACCTCGTGATCACCCGGGACGAGAACGAGAAGCTGGAATATT
AGGAGAAGTTCCAGATCATCGAGAACGTGTTCAAGCAGAAGAAGAAA
CCCACGCTGAAGCAGATCGCCAAAGAGATCCTGGTCAACGAGGAAGA
TATCAAGGGCTACAGAGTGACCAGCACCGGCAAGCCCGAGTTCACCA
ACCTGAAGGTGTACCACGACATCAAGGATATCACAGCCCGGAAAGAG
ATTATTGAGAACGCCGAGCTGCTGGACCAAATCGCCAAGATCCTGAC
CATCTACCAGAGCAGCGAGGACATCCAAGAGGAACTGACCAATCTGA
ACTCCGAGCTGACCCAAGAAGAGATCGAGCAGATCTCTAATCTGAAG
GGGTACACCGGCACACACAACCTGAGCCTGAAGGCCATCAACCTGAT
CCTGGACGAGCTGTGGCACACCAACGACAACCAGATTGCCATCTTCA
ACAGGCTGAAGCTGGTGCCCAAGAAGGTGGACCTGTCTCAGCAGAAA
GAAATCCCCACCACACTGGTGGACGACTTCATTCTGAGCCCCGTGGT
CAAGAGGAGCTTCATCCAGAGCATCAAAGTGATCAACGCCATCATCA
AGAAGTACGGGCTGCCCAACGATATCATCATCGAGCTGGCCCGCGAG
AAGAACTCCAAGGACGCCCAGAAAATGATCAACGAGATGCAGAAGAG
GAACCGCCAGACCAACGAGCGGATCGAGGAAATCATCCGGACCACCG
GCAAAGAGAACGCCAAGTACCTGATCGAGAAGATCAAGCTGCACGAC
ATGCAAGAGGGCAAGTGCCTGTACAGCCTGGAAGCCATTCCTCTGGA
AGATCTGCTGAACAATCCCTTCAACTATGAGGTGGACCACATCATCC
CCAGAAGCGTGTCCTTCGACAACAGCTTCAACAACAAGGTGCTCGTG
AAGCAAGAGGAAAACAGCAAGAAGGGCAACAGAACCCCATTCCAGTA
CCTGAGCAGCAGCGACAGCAAGATCAGCTACGAAACCTTCAAGAAGC
ACATCCTGAATCTGGCCAAAGGCAAGGGCAGAATCAGCAAGACCAAG
AAAGAATACCTGCTCGAGGAACGGGACATCAACAGATTCAGCGTGCA
GAAAGACTTCATCAATCGGAACCTGGTGGACACCAGATACGCCACCA
GAGGCCTGATGAATCTGCTGCGGAGCTACTTCAGAGTGAACAATCTG
GACGTGAAAGTCAAGTCCATCAACGGCGGCTTCACCAGCTTTCTGCG
GCGGAAGTGGAAGTTCAAGAAAGAGCGGAACAAGGGCTATAAGCACC
ACGCCGAGGACGCCCTGATCATTGCCAACGCCGATTTCATCTTCAAA
GAGTGGAAGAAACTGGACAAGGCCAAAAAAGTGATGGAAAACCAGAT
GTTCGAGGAAAAGCAGGCCGAGAGCATGCCCGAGATCGAAACCGAGC
AAGAGTACAAAGAGATTTTCATCACGCCCCACCAGATCAAGCACATT
AAGGACTTCAAGGACTACAAGTACAGCCACCGCGTGGACAAGAAGCC
CAATAGAGAGCTGATTAACGACACCCTGTACTCTACCCGGAAGGACG
ACAAGGGCAATACCCTGATCGTCAACAACCTGAACGGCCTGTACGAC
AAGGACAACGACAAGCTCAAGAAGCTGATCAACAAGAGCCCCGAGAA
ACTGCTGATGTACCACCACGATCCTCAGACCTACCAGAAACTGAAGC
TCATCATGGAACAGTACGGCGACGAGAAGAATCCCCTGTAGAAGTAG
TAGGAGGAAACCGGGAACTACCTGACCAAGTACTCCAAAAAGGACAA
TGGGCCCGTGATCAAGAAGATTAAGTATTACGGCAACAAGCTGAATG
CCCACCTGGACATCACCGACGACTACCCCAACAGCAGAAACAAGGTG
GTCAAGCTGTCCCTGAAGCCTTACAGATTCGACGTGTACCTGGACAA
CGGCGTGTACAAGTTCGTGACCGTGAAGAACCTGGACGTCATCAAAA
AAGAAAACTAGTAGGAAGTCAACAGCAAGTGCTATGAGGAAGCCAAG
AAACTCAAGAAAATCAGCAACCAGGCCGAGTTTATCGCCTCCTTCTA
CAACAACGATCTGATCAAGATCAACGGGGAGCTGTATAGAGTGATCG
GCGTGAACAATGACCTGCTGAACCGGATCGAAGTGAACATGATCGAC
ATCACCTACCGCGAGTACCTCGAGAACATGAACGATAAGCGGCCTCC
ACGGATCATTAAGACAATCGCCAGCAAGACGCAGAGCATTAAGAAGT
ACAGCACAGACATCCTGGGCAACCTGTACGAAGTGAAGTCTAAGAAG
CACCCGCAGATTATCAAGAAAGGCAGCGGCGCTCCCAAGAAAAAACG
GAAGGTTTAAGAGCTCGCTGATCAGCCTCGATAAGATACATTGATGA
GTTTGGACAAACCACAACTAGAATGCAGTGAAAAAAATGCTTTATTT
GTGAAATTTGTGATGCTATTGCTTTATTTGTAACCATTATAAGCTGC
AATAAACAAGTTAAGCTTGAATTCAGCTGACGTGCCTCGGACCGCTA
GGAACCCCTAGTGATGGAGTTGGCCACTCCCTCTCTGCGCGCTCGCT
CGCTCACTGAGGCCGGGCGACCAAAGGTCGCCCGACGCCCGGGCTTT
GCCCGGGCGGCCTCAGTGAGCGAGCGAGCGCGCAG
Exemplary pITR.CMV.SaCas9
sequence
(SEQ ID NO: 279)
CTGCGCGCTCGCTCGCTCACTGAGGCCGCCCGGGCGTCGGGCGACCT
TTGGTCGCCCGGCCTCAGTGAGCGAGCGAGCGCGCAGAGAGGGAGTG
GCCAACTCCATCACTAGGGGTTCCTGCGGCCGCACGCGTGTGATGCG
GTTTTGGCAGTACATCAATGGGCGTGGATAGCGGTTTGACTCACGGG
GATTTCCAAGTCTCCACCCCATTGACGTCAATGGGAGTTTGTTTTGG
CACCAAAATCAACGGGACTTTCCAAAATGTCGTAACAACTCCGCCCC
ATTGACGCAAATGGGCGGTAGGCGTGTACGGTGGGAGGTCTATATAA
GCAGAGCTCGTTTAGTGAACCGTcagatcgcctggagacgcACCGGT
GCCACCATGGCCCCTAAGAAGAAGCGGAAAGTCGGCAGCGGCAAGCG
GAACTATATCCTGGGCCTCGACATCGGCATCACCAGCGTTGGCTACG
GCATCATCGACTACGAGACACGGGACGTGATCGATGCCGGCGTGCGG
CTGTTTAAAGAGGCCAACGTCGAGAACAACGAGGGCCGCAGATCTAA
GAGAGGCGCCAGACGGCTGAAGCGGAGAAGAAGGCACAGAATCCAGA
GAGTGAAGAAGCTGCTGTTCGACTACAACCTGCTGACCGACCACAGC
GAGCTGAGCGGCATCAATCCTTACGAGGCCAGAGTGAAGGGCCTGAG
CCAGAAGCTGAGCGAGGAAGAGTTTAGCGCCGCTCTGCTGCACCTGG
CCAAGAGAAGAGGCGTGCACAACGTGAACGAGGTGGAAGAGGACACC
GGCAACGAGCTGTCCACCAAAGAGCAGATCAGCCGGAACAGCAAGGC
CCTGGAAGAGAAATACGTGGCCGAACTGCAGCTGGAACGGCTGAAAA
AGGATGGCGAAGTGCGGGGCAGCATCAATCGGTTCAAGACCAGCGAC
TACGTGAAAGAAGCCAAACAGCTGCTGAAGGTGCAGAAGGCCTACCA
CCAGCTGGACCAGAGCTTCATCGACACCTACATCGACCTGCTGGAAA
CCCGGCGGACCTACTATGAAGGACCTGGCGAGGGAAGCCCCTTCGGC
TGGAAGGACATCAAAGAATGGTACGAGATGCTGATGGGCCACTGCAC
CTACTTTCCCGAGGAACTGCGGAGCGTGAAGTACGCCTACAACGCCG
ACCTGTACAACGCCCTGAACGACCTGAACAACCTCGTGATCACCCGG
GACGAGAACGAGAAGCTGGAATATTAGGAGAAGTTCCAGATCATCGA
GAACGTGTTCAAGCAGAAGAAGAAACCCACGCTGAAGCAGATCGCCA
AAGAGATCCTGGTCAACGAGGAAGATATCAAGGGCTACAGAGTGACC
AGCACCGGCAAGCCCGAGTTCACCAACCTGAAGGTGTACCACGACAT
CAAGGATATCACAGCCCGGAAAGAGATTATTGAGAACGCCGAGCTGC
TGGACCAAATCGCCAAGATCCTGACCATCTACCAGAGCAGCGAGGAC
ATCCAAGAGGAACTGACCAATCTGAACTCCGAGCTGACCCAAGAAGA
GATCGAGCAGATCTCTAATCTGAAGGGGTACACCGGCACACACAACC
TGAGCCTGAAGGCCATCAACCTGATCCTGGACGAGCTGTGGCACACC
AACGACAACCAGATTGCCATCTTCAACAGGCTGAAGCTGGTGCCCAA
GAAGGTGGACCTGTCTCAGCAGAAAGAAATCCCCACCACACTGGTGG
ACGACTTCATTCTGAGCCCCGTGGTCAAGAGGAGCTTCATCCAGAGC
ATCAAAGTGATCAACGCCATCATCAAGAAGTACGGGCTGCCCAACGA
TATCATCATCGAGCTGGCCCGCGAGAAGAACTCCAAGGACGCCCAGA
AAATGATCAACGAGATGCAGAAGAGGAACCGCCAGACCAACGAGCGG
ATCGAGGAAATCATCCGGACCACCGGCAAAGAGAACGCCAAGTACCT
GATCGAGAAGATCAAGCTGCACGACATGCAAGAGGGCAAGTGCCTGT
ACAGCCTGGAAGCCATTCCTCTGGAAGATCTGCTGAACAATCCCTTC
AACTATGAGGTGGACCACATCATCCCCAGAAGCGTGTCCTTCGACAA
CAGCTTCAACAACAAGGTGCTCGTGAAGCAAGAGGAAAACAGCAAGA
AGGGCAACAGAACCCCATTCCAGTACCTGAGCAGCAGCGACAGCAAG
ATCAGCTACGAAACCTTCAAGAAGCACATCCTGAATCTGGCCAAAGG
CAAGGGCAGAATCAGCAAGACCAAGAAAGAATACCTGCTCGAGGAAC
GGGACATCAACAGATTCAGCGTGCAGAAAGACTTCATCAATCGGAAC
CTGGTGGACACCAGATACGCCACCAGAGGCCTGATGAATCTGCTGCG
GAGCTACTTCAGAGTGAACAATCTGGACGTGAAAGTCAAGTCCATCA
ACGGCGGCTTCACCAGCTTTCTGCGGCGGAAGTGGAAGTTCAAGAAA
GAGCGGAACAAGGGCTATAAGCACCACGCCGAGGACGCCCTGATCAT
TGCCAACGCCGATTTCATCTTCAAAGAGTGGAAGAAACTGGACAAGG
CCAAAAAAGTGATGGAAAACCAGATGTTCGAGGAAAAGCAGGCCGAG
AGCATGCCCGAGATCGAAACCGAGCAAGAGTACAAAGAGATTTTCAT
CACGCCCCACCAGATCAAGCACATTAAGGACTTCAAGGACTACAAGT
ACAGCCACCGCGTGGACAAGAAGCCCAATAGAGAGCTGATTAACGAC
ACCCTGTACTCTACCCGGAAGGACGACAAGGGCAATACCCTGATCGT
CAACAACCTGAACGGCCTGTACGACAAGGACAACGACAAGCTCAAGA
AGCTGATCAACAAGAGCCCCGAGAAACTGCTGATGTACCACCACGAT
CCTCAGACCTACCAGAAACTGAAGCTCATCATGGAACAGTACGGCGA
CGAGAAGAATCCCCTGTACAAGTACTACGAGGAAACCGGGAACTACC
TGACCAAGTACTCCAAAAAGGACAATGGGCCCGTGATCAAGAAGATT
AAGTATTACGGCAACAAGCTGAATGCCCACCTGGACATCACCGACGA
CTACCCCAACAGCAGAAACAAGGTGGTCAAGCTGTCCCTGAAGCCTT
ACAGATTCGACGTGTACCTGGACAACGGCGTGTACAAGTTCGTGACC
GTGAAGAACCTGGACGTCATCAAAAAAGAAAACTACTACGAAGTCAA
CAGCAAGTGCTATGAGGAAGCCAAGAAACTCAAGAAAATCAGCAACC
AGGCCGAGTTTATCGCCTCCTTCTACAACAACGATCTGATCAAGATC
AACGGGGAGCTGTATAGAGTGATCGGCGTGAACAATGACCTGCTGAA
CCGGATCGAAGTGAACATGATCGACATCACCTACCGCGAGTACCTCG
AGAACATGAACGATAAGCGGCCTCCACGGATCATTAAGACAATCGCC
AGCAAGACGCAGAGCATTAAGAAGTACAGCACAGACATCCTGGGCAA
CCTGTACGAAGTGAAGTCTAAGAAGCACCCGCAGATTATCAAGAAAG
GCAGCGGCGCTCCCAAGAAAAAACGGAAGGTTTAAGAGCTCGCTGAT
CAGCCTCGATAAGATACATTGATGAGTTTGGACAAACCACAACTAGA
ATGCAGTGAAAAAAATGCTTTATTTGTGAAATTTGTGATGCTATTGC
TTTATTTGTAACCATTATAAGCTGCAATAAACAAGTTAAGCTTGAAT
TCAGCTGACGTGCCTCGGACCGCTAGGAACCCCTAGTGATGGAGTTG
GCCACTCCCTCTCTGCGCGCTCGCTCGCTCACTGAGGCCGGGCGACC
AAAGGTCGCCCGACGCCCGGGCTTTGCCCGGGCGGCCTCAGTGAGCG
AGCGAGCGCGCAG
Exemplary pITR.CMVEnhProm-SaCas9_CRISPRi
sequence
(SEQ ID NO: 280)
CCTGCAGGCAGCTGCGCGCTCGCTCGCTCACTGAGGCCGCCCGGGCG
TCGGGCGACCTTTGGTCGCCCGGCCTCAGTGAGCGAGCGAGCGCGCA
GAGAGGGAGTGGCCAACTCCATCACTAGGGGTTCCTGCGGCCGCACG
CGTCGTTACATAACTTACGGTAAATGGCCCGCCTGGCTGACCGCCCA
ACGACCCCCGCCCATTGACGTCAATAATGACGTATGTTCCCATAGTA
ACGCCAATAGGGACTTTCCATTGACGTCAATGGGTGGAGTATTTACG
GTAAACTGCCCACTTGGCAGTACATCAAGTGTATCATATGCCAAGTA
CGCCCCCTATTGACGTCAATGACGGTAAATGGCCCGCCTGGCATTAT
GCCCAGTACATGACCTTATGGGACTTTCCTACTTGGCAGTACATCTA
CGTATTAGTCATCGCTATTACCATGGTGATGCGGTTTTGGCAGTACA
TCAATGGGCGTGGATAGCGGTTTGACTCACGGGGATTTCCAAGTCTC
CACCCCATTGACGTCAATGGGAGTTTGTTTTGGCACCAAAATCAACG
GGACTTTCCAAAATGTCGTAACAACTCCGCCCCATTGACGCAAATGG
GCGGTAGGCGTGTACGGTGGGAGGTCTATATAAGCAGAGCTCGTTTA
GTGAACCGTcagatcgcctggagacgcACCGGTGCCACCATGGCCCC
TAAGAAGAAGCGGAAAGTCGGCAGCGGCAAGCGGAACTATATCCTGG
GCCTCGCCATCGGCATCACCAGCGTTGGCTACGGCATCATCGACTAC
GAGACACGGGACGTGATCGATGCCGGCGTGCGGCTGTTTAAAGAGGC
CAACGTCGAGAACAACGAGGGCCGCAGATCTAAGAGAGGCGCCAGAC
GGCTGAAGCGGAGAAGAAGGCACAGAATCCAGAGAGTGAAGAAGCTG
CTGTTCGACTACAACCTGCTGACCGACCACAGCGAGCTGAGCGGCAT
CAATCCTTACGAGGCCAGAGTGAAGGGCCTGAGCCAGAAGCTGAGCG
AGGAAGAGTTTAGCGCCGCTCTGCTGCACCTGGCCAAGAGAAGAGGC
GTGCACAACGTGAACGAGGTGGAAGAGGACACCGGCAACGAGCTGTC
CACCAAAGAGCAGATCAGCCGGAACAGCAAGGCCCTGGAAGAGAAAT
ACGTGGCCGAACTGCAGCTGGAACGGCTGAAAAAGGATGGCGAAGTG
CGGGGCAGCATCAATCGGTTCAAGACCAGCGACTACGTGAAAGAAGC
CAAACAGCTGCTGAAGGTGCAGAAGGCCTACCACCAGCTGGACCAGA
GCTTCATCGACACCTACATCGACCTGCTGGAAACCCGGCGGACCTAC
TATGAAGGACCTGGCGAGGGAAGCCCCTTCGGCTGGAAGGACATCAA
AGAATGGTACGAGATGCTGATGGGCCACTGCACCTACTTTCCCGAGG
AACTGCGGAGCGTGAAGTACGCCTACAACGCCGACCTGTACAACGCC
CTGAACGACCTGAACAACCTCGTGATCACCCGGGACGAGAACGAGAA
GCTGGAATATTAGGAGAAGTTCCAGATCATCGAGAACGTGTTCAAGC
AGAAGAAGAAACCCACGCTGAAGCAGATCGCCAAAGAGATCCTGGTC
AACGAGGAAGATATCAAGGGCTACAGAGTGACCAGCACCGGCAAGCC
CGAGTTCACCAACCTGAAGGTGTACCACGACATCAAGGATATCACAG
CCCGGAAAGAGATTATTGAGAACGCCGAGCTGCTGGACCAAATCGCC
AAGATCCTGACCATCTACCAGAGCAGCGAGGACATCCAAGAGGAACT
GACCAATCTGAACTCCGAGCTGACCCAAGAAGAGATCGAGCAGATCT
CTAATCTGAAGGGGTACACCGGCACACACAACCTGAGCCTGAAGGCC
ATCAACCTGATCCTGGACGAGCTGTGGCACACCAACGACAACCAGAT
TGCCATCTTCAACAGGCTGAAGCTGGTGCCCAAGAAGGTGGACCTGT
CTCAGCAGAAAGAAATCCCCACCACACTGGTGGACGACTTCATTCTG
AGCCCCGTGGTCAAGAGGAGCTTCATCCAGAGCATCAAAGTGATCAA
CGCCATCATCAAGAAGTACGGGCTGCCCAACGATATCATCATCGAGC
TGGCCCGCGAGAAGAACTCCAAGGACGCCCAGAAAATGATCAACGAG
ATGCAGAAGAGGAACCGCCAGACCAACGAGCGGATCGAGGAAATCAT
CCGGACCACCGGCAAAGAGAACGCCAAGTACCTGATCGAGAAGATCA
AGCTGCACGACATGCAAGAGGGCAAGTGCCTGTACAGCCTGGAAGCC
ATTCCTCTGGAAGATCTGCTGAACAATCCCTTCAACTATGAGGTGGA
CCACATCATCCCCAGAAGCGTGTCCTTCGACAACAGCTTCAACAACA
AGGTGCTCGTGAAGCAAGAGGAAGCCAGCAAGAAGGGCAACAGAACC
CCATTCCAGTACCTGAGCAGCAGCGACAGCAAGATCAGCTACGAAAC
CTTCAAGAAGCACATCCTGAATCTGGCCAAAGGCAAGGGCAGAATCA
GCAAGACCAAGAAAGAATACCTGCTCGAGGAACGGGACATCAACAGA
TTCAGCGTGCAGAAAGACTTCATCAATCGGAACCTGGTGGACACCAG
ATACGCCACCAGAGGCCTGATGAATCTGCTGCGGAGCTACTTCAGAG
TGAACAATCTGGACGTGAAAGTCAAGTCCATCAACGGCGGCTTCACC
AGCTTTCTGCGGCGGAAGTGGAAGTTCAAGAAAGAGCGGAACAAGGG
CTATAAGCACCACGCCGAGGACGCCCTGATCATTGCCAACGCCGATT
TCATCTTCAAAGAGTGGAAGAAACTGGACAAGGCCAAAAAAGTGATG
GAAAACCAGATGTTCGAGGAAAAGCAGGCCGAGAGCATGCCCGAGAT
CGAAACCGAGCAAGAGTACAAAGAGATTTTCATCACGCCCCACCAGA
TCAAGCACATTAAGGACTTCAAGGACTACAAGTACAGCCACCGCGTG
GACAAGAAGCCCAATAGAGAGCTGATTAACGACACCCTGTACTCTAC
CCGGAAGGACGACAAGGGCAATACCCTGATCGTCAACAACCTGAACG
GCCTGTACGACAAGGACAACGACAAGCTCAAGAAGCTGATCAACAAG
AGCCCCGAGAAACTGCTGATGTACCACCACGATCCTCAGACCTACCA
GAAACTGAAGCTCATCATGGAACAGTACGGCGACGAGAAGAATCCCC
TGTACAAGTACTACGAGGAAACCGGGAACTACCTGACCAAGTACTCC
AAAAAGGACAATGGGCCCGTGATCAAGAAGATTAAGTATTACGGCAA
CAAGCTGAATGCCCACCTGGACATCACCGACGACTACCCCAACAGCA
GAAACAAGGTGGTCAAGCTGTCCCTGAAGCCTTACAGATTCGACGTG
TACCTGGACAACGGCGTGTACAAGTTCGTGACCGTGAAGAACCTGGA
CGTCATCAAAAAAGAAAACTACTACGAAGTCAACAGCAAGTGCTATG
AGGAAGCCAAGAAACTCAAGAAAATGAGCAACGAGGCCGAGTTTATC
GCCTCCTTCTACAACAACGATCTGATCAAGATCAACGGGGAGCTGTA
TAGAGTGATCGGCGTGAACAATGACCTGCTGAACCGGATCGAAGTGA
ACATGATCGACATCACCTACCGCGAGTACCTCGAGAACATGAACGAT
AAGCGGCCTCCACGGATCATTAAGACAATCGCCAGCAAGACGCAGAG
CATTAAGAAGTACAGCACAGACATCCTGGGCAACCTGTACGAAGTGA
AGTCTAAGAAGCACCCGCAGATTATCAAGAAAGGCAGCGGCGCTCCC
AAGAAAAAACGGAAGGTTTAAGAGCTCGCTGATCAGCCTCGATAAGA
TACATTGATGAGTTTGGACAAACCACAACTAGAATGCAGTGAAAAAA
ATGCTTTATTTGTGAAATTTGTGATGCTATTGCTTTATTTGTAACCA
TTATAAGCTGCAATAAACAAGTTAAGCTTGAATTCAGCTGACGTGCC
TCGGACCGCTAGGAACCCCTAGTGATGGAGTTGGCCACTCCCTCTCT
GCGCGCTCGCTCGCTCACTGAGGCCGGGCGACCAAAGGTCGCCCGAC
GCCCGGGCTTTGCCCGGGCGGCCTCAGTGAGCGAGCGAGCGCGCAGC
TGCCTGCAGGGGCGCCTGATGCGGTATTTTCTCCTTACGCATCTGTG
CGGTATTTCACACCGCATACGTCAAAGCAACCATAGTACGCGCCCTG
TAGCGGCGCATTAAGCGCGGCGGGTGTGGTGGTTACGCGCAGCGTGA
CCGCTACACTTGCCAGCGCCCTAGCGCCCGCTCCTTTCGCTTTCTTC
CCTTCCTTTCTCGCCACGTTCGCCGGCTTTCCCCGTCAAGCTCTAAA
TCGGGGGCTCCCTTTAGGGTTCCGATTTAGTGCTTTACGGCACCTCG
ACCCCAAAAAACTTGATTTGGGTGATGGTTCACGTAGTGGGCCATCG
CCCTGATAGACGGTTTTTCGCCCTTTGACGTTGGAGTCCACGTTCTT
TAATAGTGGACTCTTGTTCCAAACTGGAACAACACTCAACCCTATCT
CGGGCTATTCTTTTGATTTATAAGGGATTTTGCCGATTTCGGCCTAT
TGGTTAAAAAATGAGCTGATTTAACAAAAATTTAACGCGAATTTTAA
CAAAATATTAACGTTTACAATTTTATGGTGCACTCTCAGTACAATCT
GCTCTGATGCCGCATAGTTAAGCCAGCCCCGACACCCGCCAACACCC
GCTGACGCGCCCTGACGGGCTTGTCTGCTCCCGGCATCCGCTTACAG
ACAAGCTGTGACCGTCTCCGGGAGCTGCATGTGTCAGAGGTTTTCAC
CGTCATCACCGAAACGCGCGAGACGAAAGGGCCTCGTGATACGCCTA
TTTTTATAGGTTAATGTCATGAACAATAAAACTGTCTGCTTACATAA
ACAGTAATACAAGGGGTGTTATGAGCCATATTCAACGGGAAACGTCG
AGGCCGCGATTAAATTCCAACATGGATGCTGATTTATATGGGTATAA
ATGGGCTCGCGATAATGTCGGGCAATCAGGTGCGACAATCTATCGCT
TGTATGGGAAGCCCGATGCGCCAGAGTTGTTTCTGAAACATGGCAAA
GGTAGCGTTGCCAATGATGTTACAGATGAGATGGTCAGACTAAACTG
GCTGACGGAATTTATGCCTCTTCCGACCATCAAGCATTTTATCCGTA
CTCCTGATGATGCATGGTTACTCACCACTGCGATCCCCGGAAAAACA
GCATTCCAGGTATTAGAAGAATATCCTGATTCAGGTGAAAATATTGT
TGATGCGCTGGCAGTGTTCCTGCGCCGGTTGCATTCGATTCCTGTTT
GTAATTGTCCTTTTAACAGCGATCGCGTATTTCGTCTCGCTCAGGCG
CAATCACGAATGAATAACGGTTTGGTTGATGCGAGTGATTTTGATGA
CGAGCGTAATGGCTGGCCTGTTGAACAAGTCTGGAAAGAAATGCATA
AACTTTTGCCATTCTCACCGGATTCAGTCGTCACTCATGGTGATTTC
TCACTTGATAACCTTATTTTTGACGAGGGGAAATTAATAGGTTGTAT
TGATGTTGGACGAGTCGGAATCGCAGACCGATACCAGGATCTTGCCA
TCCTATGGAACTGCCTCGGTGAGTTTTCTCCTTCATTACAGAAACGG
CTTTTTCAAAAATATGGTATTGATAATCCTGATATGAATAAATTGCA
GTTTCATTTGATGCTCGATGAGTTTTTCTAATCTCATGACCAAAATC
CCTTAACGTGAGTTTTCGTTCCACTGAGCGTCAGACCCCGTAGAAAA
GATCAAAGGATCTTCTTGAGATCCTTTTTTTCTGCGCGTAATCTGCT
GCTTGCAAACAAAAAAACCACCGCTACCAGCGGTGGTTTGTTTGCCG
GATCAAGAGCTACCAACTCTTTTTCCGAAGGTAACTGGCTTCAGCAG
AGCGCAGATACCAAATACTGTCCTTCTAGTGTAGCCGTAGTTAGGCC
ACCACTTCAAGAACTCTGTAGCACCGCCTACATACCTCGCTCTGCTA
ATCCTGTTACCAGTGGCTGCTGCCAGTGGCGATAAGTCGTGTCTTAC
CGGGTTGGACTCAAGACGATAGTTACCGGATAAGGCGCAGCGGTCGG
GCTGAACGGGGGGTTCGTGCACACAGCCCAGCTTGGAGCGAACGAGC
TACACCGAACTGAGATACCTACAGCGTGAGCTATGAGAAAGCGCCAC
GCTTCCCGAAGGGAGAAAGGCGGACAGGTATCCGGTAAGCGGCAGGG
TCGGAACAGGAGAGCGCACGAGGGAGCTTCCAGGGGGAAACGCCTGG
TATCTTTATAGTCCTGTCGGGTTTCGCCACCTCTGACTTGAGCGTCG
ATTTTTGTGATGCTCGTCAGGGGGGCGGAGCCTATGGAAAAACGCCA
GCAACGCGGCCTTTTTACGGTTCCTGGCCTTTTGCTGGCCTTTTGCT
CACATGT

[0374] Exemplary Cas9 with GFP and sgRNA Plasmids

Exemplary pITR-CMV.SaCas9T2AGFP.U6-hsa408Rev
sequence
(SEQ ID NO: 281)
CTGCGCGCTCGCTCGCTCACTGAGGCCGCCCGGGCGTCGGGCGACCT
TTGGTCGCCCGGCCTCAGTGAGCGAGCGAGCGCGCAGAGAGGGAGTG
GCCAACTCCATCACTAGGGGTTCCTGCGGCCGCACGCGTCTAGATCC
CATATATGGAGTTCCGCGTTACATAACTTACGGTAAATGGCCCGCCT
GGCTGACCGCCCAACGACCCCCGCCCATTGACGTCAATAATGACGTA
TGTTCCCATAGTAACGCCAATAGGGACTTTCCATTGACGTCAATGGG
TGGAGTATTTACGGTAAACTGCCCACTTGGCAGTACATCAAGTGTAT
CATATGCCAAGTACGCCCCCTATTGACGTCAATGACGGTAAATGGCC
CGCCTGGCATTATGCCCAGTACATGACCTTATGGGACTTTCCTACTT
GGCAGTACATCTACGTATTAGTCATCGCTATTACCATGGTGATGCGG
TTTTGGCAGTACATCAATGGGCGTGGATAGCGGTTTGACTCACGGGG
ATTTCCAAGTCTCCACCCCATTGACGTCAATGGGAGTTTGTTTTGGC
ACCAAAATCAACGGGACTTTCCAAAATGTCGTAACAACTCCGCCCCA
TTGACGCAAATGGGCGGTAGGCGTGTACGGTGGGAGGTCTATATAAG
CAGAGCTCGTTTAGTGAACCGTcagatcgcctggagacgcACCGGTG
CCACCATGGCCCCTAAGAAGAAGCGGAAAGTCGGCAGCGGCAAGCGG
AACTATATCCTGGGCCTCGACATCGGCATCACCAGCGTTGGCTACGG
CATCATCGACTACGAGACACGGGACGTGATCGATGCCGGCGTGCGGC
TGTTTAAAGAGGCCAACGTCGAGAACAACGAGGGCCGCAGATCTAAG
AGAGGCGCCAGACGGCTGAAGCGGAGAAGAAGGCACAGAATCCAGAG
AGTGAAGAAGCTGCTGTTCGACTACAACCTGCTGACCGACCACAGCG
AGCTGAGCGGCATCAATCCTTACGAGGCCAGAGTGAAGGGCCTGAGC
CAGAAGCTGAGCGAGGAAGAGTTTAGCGCCGCTCTGCTGCACCTGGC
CAAGAGAAGAGGCGTGCACAACGTGAACGAGGTGGAAGAGGACACCG
GCAACGAGCTGTCCACCAAAGAGCAGATCAGCCGGAACAGCAAGGCC
CTGGAAGAGAAATACGTGGCCGAACTGCAGCTGGAACGGCTGAAAAA
GGATGGCGAAGTGCGGGGCAGCATCAATCGGTTCAAGACCAGCGACT
ACGTGAAAGAAGCCAAACAGCTGCTGAAGGTGCAGAAGGCCTACCAC
CAGCTGGACCAGAGCTTCATCGACACCTACATCGACCTGCTGGAAAC
CCGGCGGACCTACTATGAAGGACCTGGCGAGGGAAGCCCCTTCGGCT
GGAAGGACATCAAAGAATGGTACGAGATGCTGATGGGCCACTGCACC
TACTTTCCCGAGGAACTGCGGAGCGTGAAGTACGCCTACAACGCCGA
CCTGTACAACGCCCTGAACGACCTGAACAACCTCGTGATCACCCGGG
AGGAGAACGAGAAGCTGGAATATTAGGAGAAGTTCCAGATCATCGAG
AACGTGTTCAAGCAGAAGAAGAAACCCACGCTGAAGCAGATCGCCAA
AGAGATCCTGGTCAACGAGGAAGATATCAAGGGCTACAGAGTGACCA
GCACCGGCAAGCCCGAGTTCACCAACCTGAAGGTGTACCACGACATC
AAGGATATCACAGCCCGGAAAGAGATTATTGAGAACGCCGAGCTGCT
GGACCAAATCGCCAAGATCCTGACCATCTACCAGAGCAGCGAGGACA
TCCAAGAGGAACTGACCAATCTGAACTCCGAGCTGACCCAAGAAGAG
ATCGAGCAGATCTCTAATCTGAAGGGGTACACCGGCACACACAACCT
GAGCCTGAAGGCCATCAACCTGATCCTGGACGAGCTGTGGCACACCA
ACGACAACCAGATTGCCATCTTCAACAGGCTGAAGCTGGTGCCCAAG
AAGGTGGACCTGTCTCAGCAGAAAGAAATCCCCACCACACTGGTGGA
CGACTTCATTCTGAGCCCCGTGGTCAAGAGGAGCTTCATCCAGAGCA
TCAAAGTGATCAACGCCATCATCAAGAAGTACGGGCTGCCCAACGAT
ATCATCATCGAGCTGGCCCGCGAGAAGAACTCCAAGGACGCCCAGAA
AATGATCAACGAGATGCAGAAGAGGAACCGCCAGACCAACGAGCGGA
TCGAGGAAATCATCCGGACCACCGGCAAAGAGAACGCCAAGTACCTG
ATCGAGAAGATCAAGCTGCACGACATGCAAGAGGGCAAGTGCCTGTA
CAGCCTGGAAGCCATTCCTCTGGAAGATCTGCTGAACAATCCCTTCA
ACTATGAGGTGGACCACATCATCCCCAGAAGCGTGTCCTTCGACAAC
AGCTTCAACAACAAGGTGCTCGTGAAGCAAGAGGAAAACAGCAAGAA
GGGCAACAGAACCCCATTCCAGTACCTGAGCAGCAGCGACAGCAAGA
TCAGCTACGAAACCTTCAAGAAGCACATCCTGAATCTGGCCAAAGGC
AAGGGCAGAATCAGCAAGACCAAGAAAGAATACCTGCTCGAGGAACG
GGACATCAACAGATTCAGCGTGCAGAAAGACTTCATCAATCGGAACC
TGGTGGACACCAGATACGCCACCAGAGGCCTGATGAATCTGCTGCGG
AGCTACTTCAGAGTGAACAATCTGGACGTGAAAGTCAAGTCCATCAA
CGGCGGCTTCACCAGCTTTCTGCGGCGGAAGTGGAAGTTCAAGAAAG
AGCGGAACAAGGGCTATAAGCACCACGCCGAGGACGCCCTGATCATT
GCCAACGCCGATTTCATCTTCAAAGAGTGGAAGAAACTGGACAAGGC
CAAAAAAGTGATGGAAAACCAGATGTTCGAGGAAAAGCAGGCCGAGA
GCATGCCCGAGATCGAAACCGAGCAAGAGTACAAAGAGATTTTCATC
ACGCCCCACCAGATCAAGCACATTAAGGACTTCAAGGACTACAAGTA
CAGCCACCGCGTGGACAAGAAGCCCAATAGAGAGCTGATTAACGACA
CCCTGTACTCTACCCGGAAGGACGACAAGGGCAATACCCTGATCGTC
AACAACCTGAACGGCCTGTACGACAAGGACAACGACAAGCTCAAGAA
GCTGATCAACAAGAGCCCCGAGAAACTGCTGATGTACCACCACGATC
CTCAGACCTACCAGAAACTGAAGCTCATCATGGAACAGTACGGCGAC
GAGAAGAATCCCCTGTACAAGTACTACGAGGAAACCGGGAACTACCT
GACCAAGTACTCCAAAAAGGACAATGGGCCCGTGATCAAGAAGATTA
AGTATTAGGGCAACAAGCTGAATGCCCACCTGGACATCACCGACGAC
TACCCCAACAGCAGAAACAAGGTGGTCAAGCTGTCCCTGAAGCCTTA
CAGATTCGACGTGTACCTGGACAACGGCGTGTACAAGTTCGTGACCG
TGAAGAACCTGGACGTCATCAAAAAAGAAAACTACTAGGAAGTCAAC
AGCAAGTGCTATGAGGAAGCCAAGAAACTCAAGAAAATCAGCAACCA
GGCCGAGTTTATCGCCTCCTTCTACAACAACGATCTGATCAAGATCA
ACGGGGAGCTGTATAGAGTGATCGGCGTGAACAATGACCTGCTGAAC
CGGATCGAAGTGAACATGATCGACATCACCTACCGCGAGTACCTCGA
GAACATGAACGATAAGCGGCCTCCACGGATCATTAAGACAATCGCCA
GCAAGACGCAGAGCATTAAGAAGTACAGCACAGACATCCTGGGCAAC
CTGTACGAAGTGAAGTCTAAGAAGCACCCGCAGATTATCAAGAAAGG
CAGCGGCGCTCCCAAGAAAAAACGGAAGGTTGGCTCCGGAGAGGGCA
GAGGAAGTCTGCTAACATGCGGTGACGTCGAGGAGAATCCTGGCCCA
ATGGAGAGCGACGAGAGCGGCCTGCCCGCCATGGAGATCGAGTGCCG
CATCACCGGCACCCTGAACGGCGTGGAGTTCGAGCTGGTGGGCGGCG
GAGAGGGCACCCCCGAGCAGGGCCGCATGACCAACAAGATGAAGAGC
ACCAAAGGCGCCCTGACCTTCAGCCCCTACCTGCTGAGCCACGTGAT
GGGCTACGGCTTCTACCACTTCGGCACCTACCCCAGCGGCTACGAGA
ACCCCTTCCTGCACGCCATCAACAACGGCGGCTACACCAACACCCGC
ATCGAGAAGTACGAGGACGGCGGCGTGCTGCACGTGAGCTTCAGCTA
CCGCTACGAGGCCGGCCGCGTGATCGGCGACTTCAAGGTGATGGGCA
CCGGCTTCCCCGAGGACAGCGTGATCTTCACCGACAAGATCATCCGC
AGCAACGCCACCGTGGAGCACCTGCACCCCATGGGCGATAACGATCT
GGATGGCAGCTTCACCCGCACCTTCAGCCTGCGCGACGGCGGCTACT
ACAGCTCCGTGGTGGACAGCCACATGCACTTCAAGAGCGCCATCCAC
CCCAGCATCCTGCAGAACGGGGGCCCCATGTTCGCCTTCCGCCGCGT
GGAGGAGGATCACAGCAACACCGAGCTGGGCATCGTGGAGTACCAGC
ACGCCTTCAAGACCCCGGATGCAGATGCCGGTGAAGAATAAGAGCTC
GCTGATCAGCCTCGATAAGATACATTGATGAGTTTGGACAAACCACA
ACTAGAATGCAGTGAAAAAAATGCTTTATTTGTGAAATTTGTGATGC
TATTGCTTTATTTGTAACCATTATAAGCTGCAATAAACAAGTTTTAA
TTAAGGTCGGGCAGGAAGAGGGCCTATTTCCCATGATTCCTTCATAT
TTGCATATACGATACAAGGCTGTTAGAGAGATAATTAGAATTAATTT
GACTGTAAACACAAAGATATTAGTACAAAATACGTGACGTAGAAAGT
AATAATTTCTTGGGTAGTTTGCAGTTTTAAAATTATGTTTTAAAATG
GACTATCATATGCTTACCGTAACTTGAAAGTATTTCGATTTCTTGGC
TTTATATATCTTGTGGAAAGGACGAAACACCGAAGCCGAAAACCACG
ATCATCGTTTAAGTACTCTGTGCTGGAAACAGCACAGAATCTACTTA
AACAAGGCAAAATGCCGTGTTTATCTCGTCAACTTGTTGGCGAGATT
TTttctaAAGCTTGAATTCAGCTGACGTGCCTCGGACCGCTAGGAAC
CCCTAGTGATGGAGTTGGCCACTCCCTCTCTGCGCGCTCGCTCGCTC
ACTGAGGCCGGGCGACCAAAGGTCGCCCGACGCCCGGGCTTTGCCCG
GGCGGCCTCAGTGAGCGAGCGAGCGCGCAG
Exemplary pITR-CMV.deadSaCas9T2AGFP.U6-hsa408Rev
sequence
(SEQ ID NO: 282)
CTGCGCGCTCGCTCGCTCACTGAGGCCGCCCGGGCGTCGGGCGACCT
TTGGTCGCCCGGCCTCAGTGAGCGAGCGAGCGCGCAGAGAGGGAGTG
GCCAACTCCATCACTAGGGGTTCCTGCGGCCGCACGCGTCTAGATCC
CATATATGGAGTTCCGCGTTACATAACTTACGGTAAATGGCCCGCCT
GGCTGACCGCCCAACGACCCCCGCCCATTGACGTCAATAATGACGTA
TGTTCCCATAGTAACGCCAATAGGGACTTTCCATTGACGTCAATGGG
TGGAGTATTTACGGTAAACTGCCCACTTGGCAGTACATCAAGTGTAT
CATATGCCAAGTACGCCCCCTATTGACGTCAATGACGGTAAATGGCC
CGCCTGGCATTATGCCCAGTACATGACCTTATGGGACTTTCCTACTT
GGCAGTACATCTACGTATTAGTCATCGCTATTACCATGGTGATGCGG
TTTTGGCAGTACATCAATGGGCGTGGATAGCGGTTTGACTCACGGGG
ATTTCCAAGTCTCCACCCCATTGACGTCAATGGGAGTTTGTTTTGGC
ACCAAAATCAACGGGACTTTCCAAAATGTCGTAACAACTCCGCCCCA
TTGACGCAAATGGGCGGTAGGCGTGTACGGTGGGAGGTCTATATAAG
CAGAGCTCGTTTAGTGAACCGTcagatcgcctggagacgcACCGGTG
CCACCATGGCCCCTAAGAAGAAGCGGAAAGTCGGCAGCGGCAAGCGG
AACTATATCCTGGGCCTCGCCATCGGCATCACCAGCGTTGGCTACGG
CATCATCGACTACGAGACACGGGACGTGATCGATGCCGGCGTGCGGC
TGTTTAAAGAGGCCAACGTCGAGAACAACGAGGGCCGCAGATCTAAG
AGAGGCGCCAGACGGCTGAAGCGGAGAAGAAGGCACAGAATCCAGAG
AGTGAAGAAGCTGCTGTTCGACTACAACCTGCTGACCGACCACAGCG
AGCTGAGCGGCATCAATCCTTACGAGGCCAGAGTGAAGGGCCTGAGC
CAGAAGCTGAGCGAGGAAGAGTTTAGCGCCGCTCTGCTGCACCTGGC
CAAGAGAAGAGGCGTGCACAACGTGAACGAGGTGGAAGAGGACACCG
GCAACGAGCTGTCCACCAAAGAGCAGATCAGCCGGAACAGCAAGGCC
CTGGAAGAGAAATACGTGGCCGAACTGCAGCTGGAACGGCTGAAAAA
GGATGGCGAAGTGCGGGGCAGCATCAATCGGTTCAAGACCAGCGACT
ACGTGAAAGAAGCCAAACAGCTGCTGAAGGTGCAGAAGGCCTACCAC
CAGCTGGACCAGAGCTTCATCGACACCTACATCGACCTGCTGGAAAC
CCGGCGGACCTACTATGAAGGACCTGGCGAGGGAAGCCCCTTCGGCT
GGAAGGACATCAAAGAATGGTACGAGATGCTGATGGGCCACTGCACC
TACTTTCCCGAGGAACTGCGGAGCGTGAAGTACGCCTACAACGCCGA
CCTGTACAACGCCCTGAACGACCTGAACAACCTCGTGATCACCCGGG
ACGAGAACGAGAAGCTGGAATATTAGGAGAAGTTCCAGATCATCGAG
AACGTGTTCAAGCAGAAGAAGAAACCCACGCTGAAGCAGATCGCCAA
AGAGATCCTGGTCAACGAGGAAGATATCAAGGGCTACAGAGTGACCA
GCACCGGCAAGCCCGAGTTCACCAACCTGAAGGTGTACCACGACATC
AAGGATATCACAGCCCGGAAAGAGATTATTGAGAACGCCGAGCTGCT
GGACCAAATCGCCAAGATCCTGACCATCTACCAGAGCAGCGAGGACA
TCCAAGAGGAACTGACCAATCTGAACTCCGAGCTGACCCAAGAAGAG
ATCGAGCAGATCTCTAATCTGAAGGGGTACACCGGCACACACAACCT
GAGCCTGAAGGCCATCAACCTGATCCTGGACGAGCTGTGGCACACCA
ACGACAACCAGATTGCCATCTTCAACAGGCTGAAGCTGGTGCCCAAG
AAGGTGGACCTGTCTCAGCAGAAAGAAATCCCCACCACACTGGTGGA
CGACTTCATTCTGAGCCCCGTGGTCAAGAGGAGCTTCATCCAGAGCA
TCAAAGTGATCAACGCCATCATCAAGAAGTACGGGCTGCCCAACGAT
ATCATCATCGAGCTGGCCCGCGAGAAGAACTCCAAGGACGCCCAGAA
AATGATCAACGAGATGCAGAAGAGGAACCGCCAGACCAACGAGCGGA
TCGAGGAAATCATCCGGACCACCGGCAAAGAGAACGCCAAGTACCTG
ATCGAGAAGATCAAGCTGCACGACATGCAAGAGGGCAAGTGCCTGTA
CAGCCTGGAAGCCATTCCTCTGGAAGATCTGCTGAACAATCCCTTCA
ACTATGAGGTGGACCACATCATCCCCAGAAGCGTGTCCTTCGACAAC
AGCTTCAACAACAAGGTGCTCGTGAAGCAAGAGGAAGCCAGCAAGAA
GGGCAACAGAACCCCATTCCAGTACCTGAGCAGCAGCGACAGCAAGA
TCAGCTACGAAACCTTCAAGAAGCACATCCTGAATCTGGCCAAAGGC
AAGGGCAGAATCAGCAAGACCAAGAAAGAATACCTGCTCGAGGAACG
GGACATCAACAGATTCAGCGTGCAGAAAGACTTCATCAATCGGAACC
TGGTGGACACCAGATACGCCACCAGAGGCCTGATGAATCTGCTGCGG
AGCTACTTCAGAGTGAACAATCTGGACGTGAAAGTCAAGTCCATCAA
CGGCGGCTTCACCAGCTTTCTGCGGCGGAAGTGGAAGTTCAAGAAAG
AGCGGAACAAGGGCTATAAGCACCACGCCGAGGACGCCCTGATCATT
GCCAACGCCGATTTCATCTTCAAAGAGTGGAAGAAACTGGACAAGGC
CAAAAAAGTGATGGAAAACCAGATGTTCGAGGAAAAGCAGGCCGAGA
GCATGCCCGAGATCGAAACCGAGCAAGAGTACAAAGAGATTTTCATC
ACGCCCCACCAGATCAAGCACATTAAGGACTTCAAGGACTACAAGTA
CAGCCACCGCGTGGACAAGAAGCCCAATAGAGAGCTGATTAACGACA
CCCTGTACTCTACCCGGAAGGACGACAAGGGCAATACCCTGATCGTC
AACAACCTGAACGGCCTGTACGACAAGGACAACGACAAGCTCAAGAA
GCTGATCAACAAGAGCCCCGAGAAACTGCTGATGTACCACCACGATC
CTCAGACCTACCAGAAACTGAAGCTCATCATGGAACAGTACGGCGAC
GAGAAGAATCCCCTGTACAAGTACTACGAGGAAACCGGGAACTACCT
GACCAAGTACTCCAAAAAGGACAATGGGCCCGTGATCAAGAAGATTA
AGTATTAGGGCAACAAGCTGAATGCCCACCTGGACATCACCGACGAC
TACCCCAACAGCAGAAACAAGGTGGTCAAGCTGTCCCTGAAGCCTTA
CAGATTCGACGTGTACCTGGACAACGGCGTGTACAAGTTCGTGACCG
TGAAGAACCTGGACGTCATCAAAAAAGAAAACTACTAGGAAGTCAAC
AGCAAGTGCTATGAGGAAGCCAAGAAACTCAAGAAAATCAGCAACCA
GGCCGAGTTTATCGCCTCCTTCTACAACAACGATCTGATCAAGATCA
ACGGGGAGCTGTATAGAGTGATCGGCGTGAACAATGACCTGCTGAAC
CGGATCGAAGTGAACATGATCGACATCACCTACCGCGAGTACCTCGA
GAACATGAACGATAAGCGGCCTCCACGGATCATTAAGACAATCGCCA
GCAAGACGCAGAGCATTAAGAAGTACAGCACAGACATCCTGGGCAAC
CTGTACGAAGTGAAGTCTAAGAAGCACCCGCAGATTATCAAGAAAGG
CAGCGGCGCTCCCAAGAAAAAACGGAAGGTTGGCTCCGGAGAGGGCA
GAGGAAGTCTGCTAACATGCGGTGACGTCGAGGAGAATCCTGGCCCA
ATGGAGAGCGACGAGAGCGGCCTGCCCGCCATGGAGATCGAGTGCCG
CATCACCGGCACCCTGAACGGCGTGGAGTTCGAGCTGGTGGGCGGCG
GAGAGGGCACCCCCGAGCAGGGCCGCATGACCAACAAGATGAAGAGC
ACCAAAGGCGCCCTGACCTTCAGCCCCTACCTGCTGAGCCACGTGAT
GGGCTACGGCTTCTACCACTTCGGCACCTACCCCAGCGGCTACGAGA
ACCCCTTCCTGCACGCCATCAACAACGGCGGCTACACCAACACCCGC
ATCGAGAAGTACGAGGACGGCGGCGTGCTGCACGTGAGCTTCAGCTA
CCGCTACGAGGCCGGCCGCGTGATCGGCGACTTCAAGGTGATGGGCA
CCGGCTTCCCCGAGGACAGCGTGATCTTCACCGACAAGATCATCCGC
AGCAACGCCACCGTGGAGCACCTGCACCCCATGGGCGATAACGATCT
GGATGGCAGCTTCACCCGCACCTTCAGCCTGCGCGACGGCGGCTACT
ACAGCTCCGTGGTGGACAGCCACATGCACTTCAAGAGCGCCATCCAC
CCCAGCATCCTGCAGAACGGGGGCCCCATGTTCGCCTTCCGCCGCGT
GGAGGAGGATCACAGCAACACCGAGCTGGGCATCGTGGAGTACCAGC
ACGCCTTCAAGACCCCGGATGCAGATGCCGGTGAAGAATAAGAGCTC
GCTGATCAGCCTCGATAAGATACATTGATGAGTTTGGACAAACCACA
ACTAGAATGCAGTGAAAAAAATGCTTTATTTGTGAAATTTGTGATGC
TATTGCTTTATTTGTAACCATTATAAGCTGCAATAAACAAGTTTTAA
TTAAGGTCGGGCAGGAAGAGGGCCTATTTCCCATGATTCCTTCATAT
TTGCATATACGATACAAGGCTGTTAGAGAGATAATTAGAATTAATTT
GACTGTAAACACAAAGATATTAGTACAAAATACGTGACGTAGAAAGT
AATAATTTCTTGGGTAGTTTGCAGTTTTAAAATTATGTTTTAAAATG
GACTATCATATGCTTACCGTAACTTGAAAGTATTTCGATTTCTTGGC
TTTATATATCTTGTGGAAAGGACGAAACACCGAAGCCGAAAACCACG
ATCATCGTTTAAGTACTCTGTGCTGGAAACAGCACAGAATCTACTTA
AACAAGGCAAAATGCCGTGTTTATCTCGTCAACTTGTTGGCGAGATT
TTTTCTAAAGCTTGAATTCAGCTGACGTGCCTCGGACCGCTAGGAAC
CCCTAGTGATGGAGTTGGCCACTCCCTCTCTGCGCGCTCGCTCGCTC
ACTGAGGCCGGGCGACCAAAGGTCGCCCGACGCCCGGGCTTTGCCCG
GGCGGCCTCAGTGAGCGAGCGAGCGCGCAG
Exemplary pITR-CMV.SaCas9T2AGFP.U6-hsammu386Fw
sequence
(SEQ ID NO: 283)
CTGCGCGCTCGCTCGCTCACTGAGGCCGCCCGGGCGTCGGGCGACCT
TTGGTCGCCCGGCCTCAGTGAGCGAGCGAGCGCGCAGAGAGGGAGTG
GCCAACTCCATCACTAGGGGTTCCTGCGGCCGCACGCGTCTAGATCC
CATATATGGAGTTCCGCGTTACATAACTTACGGTAAATGGCCCGCCT
GGCTGACCGCCCAACGACCCCCGCCCATTGACGTCAATAATGACGTA
TGTTCCCATAGTAACGCCAATAGGGACTTTCCATTGACGTCAATGGG
TGGAGTATTTACGGTAAACTGCCCACTTGGCAGTACATCAAGTGTAT
CATATGCCAAGTACGCCCCCTATTGACGTCAATGACGGTAAATGGCC
CGCCTGGCATTATGCCCAGTACATGACCTTATGGGACTTTCCTACTT
GGCAGTACATCTACGTATTAGTCATCGCTATTACCATGGTGATGCGG
TTTTGGCAGTACATCAATGGGCGTGGATAGCGGTTTGACTCACGGGG
ATTTCCAAGTCTCCACCCCATTGACGTCAATGGGAGTTTGTTTTGGC
ACCAAAATCAACGGGACTTTCCAAAATGTCGTAACAACTCCGCCCCA
TTGACGCAAATGGGCGGTAGGCGTGTACGGTGGGAGGTCTATATAAG
CAGAGCTCGTTTAGTGAACCGTcagatcgcctggagacgcACCGGTG
CCACCATGGCCCCTAAGAAGAAGCGGAAAGTCGGCAGCGGCAAGCGG
AACTATATCCTGGGCCTCGACATCGGCATCACCAGCGTTGGCTACGG
CATCATCGACTACGAGACACGGGACGTGATCGATGCCGGCGTGCGGC
TGTTTAAAGAGGCCAACGTCGAGAACAACGAGGGCCGCAGATCTAAG
AGAGGCGCCAGACGGCTGAAGCGGAGAAGAAGGCACAGAATCCAGAG
AGTGAAGAAGCTGCTGTTCGACTACAACCTGCTGACCGACCACAGCG
AGCTGAGCGGCATCAATCCTTACGAGGCCAGAGTGAAGGGCCTGAGC
CAGAAGCTGAGCGAGGAAGAGTTTAGCGCCGCTCTGCTGCACCTGGC
CAAGAGAAGAGGCGTGCACAACGTGAACGAGGTGGAAGAGGACACCG
GCAACGAGCTGTCCACCAAAGAGCAGATCAGCCGGAACAGCAAGGCC
CTGGAAGAGAAATACGTGGCCGAACTGCAGCTGGAACGGCTGAAAAA
GGATGGCGAAGTGCGGGGCAGCATCAATCGGTTCAAGACCAGCGACT
ACGTGAAAGAAGCCAAACAGCTGCTGAAGGTGCAGAAGGCCTACCAC
CAGCTGGACCAGAGCTTCATCGACACCTACATCGACCTGCTGGAAAC
CCGGCGGACCTACTATGAAGGACCTGGCGAGGGAAGCCCCTTCGGCT
GGAAGGACATCAAAGAATGGTACGAGATGCTGATGGGCCACTGCACC
TACTTTCCCGAGGAACTGCGGAGCGTGAAGTACGCCTACAACGCCGA
CCTGTACAACGCCCTGAACGACCTGAACAACCTCGTGATCACCCGGG
ACGAGAACGAGAAGCTGGAATATTAGGAGAAGTTCCAGATCATCGAG
AACGTGTTCAAGCAGAAGAAGAAACCCACGCTGAAGCAGATCGCCAA
AGAGATCCTGGTCAACGAGGAAGATATCAAGGGCTACAGAGTGACCA
GCACCGGCAAGCCCGAGTTCACCAACCTGAAGGTGTACCACGACATC
AAGGATATCACAGCCCGGAAAGAGATTATTGAGAACGCCGAGCTGCT
GGACCAAATCGCCAAGATCCTGACCATCTACCAGAGCAGCGAGGACA
TCCAAGAGGAACTGACCAATCTGAACTCCGAGCTGACCCAAGAAGAG
ATCGAGCAGATCTCTAATCTGAAGGGGTACACCGGCACACACAACCT
GAGCCTGAAGGCCATCAACCTGATCCTGGACGAGCTGTGGCACACCA
ACGACAACCAGATTGCCATCTTCAACAGGCTGAAGCTGGTGCCCAAG
AAGGTGGACCTGTCTCAGCAGAAAGAAATCCCCACCACACTGGTGGA
CGACTTCATTCTGAGCCCCGTGGTCAAGAGGAGCTTCATCCAGAGCA
TCAAAGTGATCAACGCCATCATCAAGAAGTACGGGCTGCCCAACGAT
ATCATCATCGAGCTGGCCCGCGAGAAGAACTCCAAGGACGCCCAGAA
AATGATCAACGAGATGCAGAAGAGGAACCGCCAGACCAACGAGCGGA
TCGAGGAAATCATCCGGACCACCGGCAAAGAGAACGCCAAGTACCTG
ATCGAGAAGATCAAGCTGCACGACATGCAAGAGGGCAAGTGCCTGTA
CAGCCTGGAAGCCATTCCTCTGGAAGATCTGCTGAACAATCCCTTCA
ACTATGAGGTGGACCACATCATCCCCAGAAGCGTGTCCTTCGACAAC
AGCTTCAACAACAAGGTGCTCGTGAAGCAAGAGGAAAACAGCAAGAA
GGGCAACAGAACCCCATTCCAGTACCTGAGCAGCAGCGACAGCAAGA
TCAGCTACGAAACCTTCAAGAAGCACATCCTGAATCTGGCCAAAGGC
AAGGGCAGAATCAGCAAGACCAAGAAAGAATACCTGCTCGAGGAACG
GGACATCAACAGATTCAGCGTGCAGAAAGACTTCATCAATCGGAACC
TGGTGGACACCAGATACGCCACCAGAGGCCTGATGAATCTGCTGCGG
AGCTACTTCAGAGTGAACAATCTGGACGTGAAAGTCAAGTCCATCAA
CGGCGGCTTCACCAGCTTTCTGCGGCGGAAGTGGAAGTTCAAGAAAG
AGCGGAACAAGGGCTATAAGCACCACGCCGAGGACGCCCTGATCATT
GCCAACGCCGATTTCATCTTCAAAGAGTGGAAGAAACTGGACAAGGC
CAAAAAAGTGATGGAAAACCAGATGTTCGAGGAAAAGCAGGCCGAGA
GCATGCCCGAGATCGAAACCGAGCAAGAGTACAAAGAGATTTTCATC
ACGCCCCACCAGATCAAGCACATTAAGGACTTCAAGGACTACAAGTA
CAGCCACCGCGTGGACAAGAAGCCCAATAGAGAGCTGATTAACGACA
CCCTGTACTCTACCCGGAAGGACGACAAGGGCAATACCCTGATCGTC
AACAACCTGAACGGCCTGTACGACAAGGACAACGACAAGCTCAAGAA
GCTGATCAACAAGAGCCCCGAGAAACTGCTGATGTACCACCACGATC
CTCAGACCTACCAGAAACTGAAGCTCATCATGGAACAGTACGGCGAC
GAGAAGAATCCCCTGTACAAGTACTACGAGGAAACCGGGAACTACCT
GACCAAGTACTCCAAAAAGGACAATGGGCCCGTGATCAAGAAGATTA
AGTATTAGGGCAACAAGCTGAATGCCCACCTGGACATCACCGACGAC
TACCCCAACAGCAGAAACAAGGTGGTCAAGCTGTCCCTGAAGCCTTA
CAGATTCGACGTGTACCTGGACAACGGCGTGTACAAGTTCGTGACCG
TGAAGAACCTGGACGTCATCAAAAAAGAAAACTACTAGGAAGTCAAC
AGCAAGTGCTATGAGGAAGCCAAGAAACTCAAGAAAATCAGCAACCA
GGCCGAGTTTATCGCCTCCTTCTACAACAACGATCTGATCAAGATCA
ACGGGGAGCTGTATAGAGTGATCGGCGTGAACAATGACCTGCTGAAC
CGGATCGAAGTGAACATGATCGACATCACCTACCGCGAGTACCTCGA
GAACATGAACGATAAGCGGCCTCCACGGATCATTAAGACAATCGCCA
GCAAGACGCAGAGCATTAAGAAGTACAGCACAGACATCCTGGGCAAC
CTGTACGAAGTGAAGTCTAAGAAGCACCCGCAGATTATCAAGAAAGG
CAGCGGCGCTCCCAAGAAAAAACGGAAGGTTGGCTCCGGAGAGGGCA
GAGGAAGTCTGCTAACATGCGGTGACGTCGAGGAGAATCCTGGCCCA
ATGGAGAGCGACGAGAGCGGCCTGCCCGCCATGGAGATCGAGTGCCG
CATCACCGGCACCCTGAACGGCGTGGAGTTCGAGCTGGTGGGCGGCG
GAGAGGGCACCCCCGAGCAGGGCCGCATGACCAACAAGATGAAGAGC
ACCAAAGGCGCCCTGACCTTCAGCCCCTACCTGCTGAGCCACGTGAT
GGGCTACGGCTTCTACCACTTCGGCACCTACCCCAGCGGCTACGAGA
ACCCCTTCCTGCACGCCATCAACAACGGCGGCTACACCAACACCCGC
ATCGAGAAGTACGAGGACGGCGGCGTGCTGCACGTGAGCTTCAGCTA
CCGCTACGAGGCCGGCCGCGTGATCGGCGACTTCAAGGTGATGGGCA
CCGGCTTCCCCGAGGACAGCGTGATCTTCACCGACAAGATCATCCGC
AGCAACGCCACCGTGGAGCACCTGCACCCCATGGGCGATAACGATCT
GGATGGCAGCTTCACCCGCACCTTCAGCCTGCGCGACGGCGGCTACT
ACAGCTCCGTGGTGGACAGCCACATGCACTTCAAGAGCGCCATCCAC
CCCAGCATCCTGCAGAACGGGGGCCCCATGTTCGCCTTCCGCCGCGT
GGAGGAGGATCACAGCAACACCGAGCTGGGCATCGTGGAGTACCAGC
ACGCCTTCAAGACCCCGGATGCAGATGCCGGTGAAGAATAAGAGCTC
GCTGATCAGCCTCGATAAGATACATTGATGAGTTTGGACAAACCACA
ACTAGAATGCAGTGAAAAAAATGCTTTATTTGTGAAATTTGTGATGC
TATTGCTTTATTTGTAACCATTATAAGCTGCAATAAACAAGTTTTAA
TTAAGGTCGGGCAGGAAGAGGGCCTATTTCCCATGATTCCTTCATAT
TTGCATATACGATACAAGGCTGTTAGAGAGATAATTAGAATTAATTT
GACTGTAAACACAAAGATATTAGTACAAAATACGTGACGTAGAAAGT
AATAATTTCTTGGGTAGTTTGCAGTTTTAAAATTATGTTTTAAAATG
GACTATCATATGCTTACCGTAACTTGAAAGTATTTCGATTTCTTGGC
TTTATATATCTTGTGGAAAGGACGAAACACCGAGGAGCACCAGGAAC
TTGCCAGTTTAAGTACTCTGTGCTGGAAACAGCACAGAATCTAGTTA
AACAAGGCAAAATGCCGTGTTTATCTCGTCAACTTGTTGGCGAGATT
TTTTCTAAAGCTTGAATTCAGCTGACGTGCCTCGGACCGCTAGGAAC
CCCTAGTGATGGAGTTGGCCACTCCCTCTCTGCGCGCTCGCTCGCTC
ACTGAGGCCGGGCGACCAAAGGTCGCCCGACGCCCGGGCTTTGCCCG
GGCGGCCTCAGTGAGCGAGCGAGCGCGCAG
Exemplary pITR-CMV.deadSaCas9T2AGFP.U6-hsammu386Fw
sequence
(SEQ ID NO: 284)
CTGCGCGCTCGCTCGCTCACTGAGGCCGCCCGGGCGTCGGGCGACCT
TTGGTCGCCCGGCCTCAGTGAGCGAGCGAGCGCGCAGAGAGGGAGTG
GCCAACTCCATCACTAGGGGTTCCTGCGGCCGCACGCGTCTAGATCC
CATATATGGAGTTCCGCGTTACATAACTTACGGTAAATGGCCCGCCT
GGCTGACCGCCCAACGACCCCCGCCCATTGACGTCAATAATGACGTA
TGTTCCCATAGTAACGCCAATAGGGACTTTCCATTGACGTCAATGGG
TGGAGTATTTACGGTAAACTGCCCACTTGGCAGTACATCAAGTGTAT
CATATGCCAAGTACGCCCCCTATTGACGTCAATGACGGTAAATGGCC
CGCCTGGCATTATGCCCAGTACATGACCTTATGGGACTTTCCTACTT
GGCAGTACATCTACGTATTAGTCATCGCTATTACCATGGTGATGCGG
TTTTGGCAGTACATCAATGGGCGTGGATAGCGGTTTGACTCACGGGG
ATTTCCAAGTCTCCACCCCATTGACGTCAATGGGAGTTTGTTTTGGC
ACCAAAATCAACGGGACTTTCCAAAATGTCGTAACAACTCCGCCCCA
TTGACGCAAATGGGCGGTAGGCGTGTACGGTGGGAGGTCTATATAAG
CAGAGCTCGTTTAGTGAACCGTcagatcgcctggagacgcACCGGTG
CCACCATGGCCCCTAAGAAGAAGCGGAAAGTCGGCAGCGGCAAGCGG
AACTATATCCTGGGCCTCGCCATCGGCATCACCAGCGTTGGCTACGG
CATCATCGACTACGAGACACGGGACGTGATCGATGCCGGCGTGCGGC
TGTTTAAAGAGGCCAACGTCGAGAACAACGAGGGCCGCAGATCTAAG
AGAGGCGCCAGACGGCTGAAGCGGAGAAGAAGGCACAGAATCCAGAG
AGTGAAGAAGCTGCTGTTCGACTACAACCTGCTGACCGACCACAGCG
AGCTGAGCGGCATCAATCCTTACGAGGCCAGAGTGAAGGGCCTGAGC
CAGAAGCTGAGCGAGGAAGAGTTTAGCGCCGCTCTGCTGCACCTGGC
CAAGAGAAGAGGCGTGCACAACGTGAACGAGGTGGAAGAGGACACCG
GCAACGAGCTGTCCACCAAAGAGCAGATCAGCCGGAACAGCAAGGCC
CTGGAAGAGAAATACGTGGCCGAACTGCAGCTGGAACGGCTGAAAAA
GGATGGCGAAGTGCGGGGCAGCATCAATCGGTTCAAGACCAGCGACT
ACGTGAAAGAAGCCAAACAGCTGCTGAAGGTGCAGAAGGCCTACCAC
CAGCTGGACCAGAGCTTCATCGACACCTACATCGACCTGCTGGAAAC
CCGGCGGACCTACTATGAAGGACCTGGCGAGGGAAGCCCCTTCGGCT
GGAAGGACATCAAAGAATGGTACGAGATGCTGATGGGCCACTGCACC
TACTTTCCCGAGGAACTGCGGAGCGTGAAGTACGCCTACAACGCCGA
CCTGTACAACGCCCTGAACGACCTGAACAACCTCGTGATCACCCGGG
ACGAGAACGAGAAGCTGGAATATTAGGAGAAGTTCCAGATCATCGAG
AACGTGTTCAAGCAGAAGAAGAAACCCACGCTGAAGCAGATCGCCAA
AGAGATCCTGGTCAACGAGGAAGATATCAAGGGCTACAGAGTGACCA
GCACCGGCAAGCCCGAGTTCACCAACCTGAAGGTGTACCACGACATC
AAGGATATCACAGCCCGGAAAGAGATTATTGAGAACGCCGAGCTGCT
GGACCAAATCGCCAAGATCCTGACCATCTACCAGAGCAGCGAGGACA
TCCAAGAGGAACTGACCAATCTGAACTCCGAGCTGACCCAAGAAGAG
ATCGAGCAGATCTCTAATCTGAAGGGGTACACCGGCACACACAACCT
GAGCCTGAAGGCCATCAACCTGATCCTGGACGAGCTGTGGCACACCA
ACGACAACCAGATTGCCATCTTCAACAGGCTGAAGCTGGTGCCCAAG
AAGGTGGACCTGTCTCAGCAGAAAGAAATCCCCACCACACTGGTGGA
CGACTTCATTCTGAGCCCCGTGGTCAAGAGGAGCTTCATCCAGAGCA
TCAAAGTGATCAACGCCATCATCAAGAAGTACGGGCTGCCCAACGAT
ATCATCATCGAGCTGGCCCGCGAGAAGAACTCCAAGGACGCCCAGAA
AATGATCAACGAGATGCAGAAGAGGAACCGCCAGACCAACGAGCGGA
TCGAGGAAATCATCCGGACCACCGGCAAAGAGAACGCCAAGTACCTG
ATCGAGAAGATCAAGCTGCACGACATGCAAGAGGGCAAGTGCCTGTA
CAGCCTGGAAGCCATTCCTCTGGAAGATCTGCTGAACAATCCCTTCA
ACTATGAGGTGGACCACATCATCCCCAGAAGCGTGTCCTTCGACAAC
AGCTTCAACAACAAGGTGCTCGTGAAGCAAGAGGAAGCCAGCAAGAA
GGGCAACAGAACCCCATTCCAGTACCTGAGCAGCAGCGACAGCAAGA
TCAGCTACGAAACCTTCAAGAAGCACATCCTGAATCTGGCCAAAGGC
AAGGGCAGAATCAGCAAGACCAAGAAAGAATACCTGCTCGAGGAACG
GGACATCAACAGATTCAGCGTGCAGAAAGACTTCATCAATCGGAACC
TGGTGGACACCAGATACGCCACCAGAGGCCTGATGAATCTGCTGCGG
AGCTACTTCAGAGTGAACAATCTGGACGTGAAAGTCAAGTCCATCAA
CGGCGGCTTCACCAGCTTTCTGCGGCGGAAGTGGAAGTTCAAGAAAG
AGCGGAACAAGGGCTATAAGCACCACGCCGAGGACGCCCTGATCATT
GCCAACGCCGATTTCATCTTCAAAGAGTGGAAGAAACTGGACAAGGC
CAAAAAAGTGATGGAAAACCAGATGTTCGAGGAAAAGCAGGCCGAGA
GCATGCCCGAGATCGAAACCGAGCAAGAGTACAAAGAGATTTTCATC
ACGCCCCACCAGATCAAGCACATTAAGGACTTCAAGGACTACAAGTA
CAGCCACCGCGTGGACAAGAAGCCCAATAGAGAGCTGATTAACGACA
CCCTGTACTCTACCCGGAAGGACGACAAGGGCAATACCCTGATCGTC
AACAACCTGAACGGCCTGTACGACAAGGACAACGACAAGCTCAAGAA
GCTGATCAACAAGAGCCCCGAGAAACTGCTGATGTACCACCACGATC
CTCAGACCTACCAGAAACTGAAGCTCATCATGGAACAGTACGGCGAC
GAGAAGAATCCCCTGTACAAGTACTACGAGGAAACCGGGAACTACCT
GACCAAGTACTCCAAAAAGGACAATGGGCCCGTGATCAAGAAGATTA
AGTATTAGGGCAACAAGCTGAATGCCCACCTGGACATCACCGACGAC
TACCCCAACAGCAGAAACAAGGTGGTCAAGCTGTCCCTGAAGCCTTA
CAGATTCGACGTGTACCTGGACAACGGCGTGTACAAGTTCGTGACCG
TGAAGAACCTGGACGTCATCAAAAAAGAAAACTACTAGGAAGTCAAC
AGCAAGTGCTATGAGGAAGCCAAGAAACTCAAGAAAATCAGCAACCA
GGCCGAGTTTATCGCCTCCTTCTACAACAACGATCTGATCAAGATCA
ACGGGGAGCTGTATAGAGTGATCGGCGTGAACAATGACCTGCTGAAC
CGGATCGAAGTGAACATGATCGACATCACCTACCGCGAGTACCTCGA
GAACATGAACGATAAGCGGCCTCCACGGATCATTAAGACAATCGCCA
GCAAGACGCAGAGCATTAAGAAGTACAGCACAGACATCCTGGGCAAC
CTGTACGAAGTGAAGTCTAAGAAGCACCCGCAGATTATCAAGAAAGG
CAGCGGCGCTCCCAAGAAAAAACGGAAGGTTGGCTCCGGAGAGGGCA
GAGGAAGTCTGCTAACATGCGGTGACGTCGAGGAGAATCCTGGCCCA
ATGGAGAGCGACGAGAGCGGCCTGCCCGCCATGGAGATCGAGTGCCG
CATCACCGGCACCCTGAACGGCGTGGAGTTCGAGCTGGTGGGCGGCG
GAGAGGGCACCCCCGAGCAGGGCCGCATGACCAACAAGATGAAGAGC
ACCAAAGGCGCCCTGACCTTCAGCCCCTACCTGCTGAGCCACGTGAT
GGGCTACGGCTTCTACCACTTCGGCACCTACCCCAGCGGCTACGAGA
ACCCCTTCCTGCACGCCATCAACAACGGCGGCTACACCAACACCCGC
ATCGAGAAGTACGAGGACGGCGGCGTGCTGCACGTGAGCTTCAGCTA
CCGCTACGAGGCCGGCCGCGTGATCGGCGACTTCAAGGTGATGGGCA
CCGGCTTCCCCGAGGACAGCGTGATCTTCACCGACAAGATCATCCGC
AGCAACGCCACCGTGGAGCACCTGCACCCCATGGGCGATAACGATCT
GGATGGCAGCTTCACCCGCACCTTCAGCCTGCGCGACGGCGGCTACT
ACAGCTCCGTGGTGGACAGCCACATGCACTTCAAGAGCGCCATCCAC
CCCAGCATCCTGCAGAACGGGGGCCCCATGTTCGCCTTCCGCCGCGT
GGAGGAGGATCACAGCAACACCGAGCTGGGCATCGTGGAGTACCAGC
ACGCCTTCAAGACCCCGGATGCAGATGCCGGTGAAGAATAAGAGCTC
GCTGATCAGCCTCGATAAGATACATTGATGAGTTTGGACAAACCACA
ACTAGAATGCAGTGAAAAAAATGCTTTATTTGTGAAATTTGTGATGC
TATTGCTTTATTTGTAACCATTATAAGCTGCAATAAACAAGTTTTAA
TTAAGGTCGGGCAGGAAGAGGGCCTATTTCCCATGATTCCTTCATAT
TTGCATATACGATACAAGGCTGTTAGAGAGATAATTAGAATTAATTT
GACTGTAAACACAAAGATATTAGTACAAAATACGTGACGTAGAAAGT
AATAATTTCTTGGGTAGTTTGCAGTTTTAAAATTATGTTTTAAAATG
GACTATCATATGCTTACCGTAACTTGAAAGTATTTCGATTTCTTGGC
TTTATATATCTTGTGGAAAGGACGAAACACCGAGGAGCACCAGGAAC
TTGCCAGTTTAAGTACTCTGTGCTGGAAACAGCACAGAATCTAGTTA
AACAAGGCAAAATGCCGTGTTTATCTCGTCAACTTGTTGGCGAGATT
TTTTCTAAAGCTTGAATTCAGCTGACGTGCCTCGGACCGCTAGGAAC
CCCTAGTGATGGAGTTGGCCACTCCCTCTCTGCGCGCTCGCTCGCTC
ACTGAGGCCGGGCGACCAAAGGTCGCCCGACGCCCGGGCTTTGCCCG
GGCGGCCTCAGTGAGCGAGCGAGCGCGCAG
Exemplary pITR-CMV.SaCas9T2AGFP.U6-hsa233Fw
sequence
(SEQ ID NO: 285)
CTGCGCGCTCGCTCGCTCACTGAGGCCGCCCGGGCGTCGGGCGACCT
TTGGTCGCCCGGCCTCAGTGAGCGAGCGAGCGCGCAGAGAGGGAGTG
GCCAACTCCATCACTAGGGGTTCCTGCGGCCGCACGCGTCTAGATCC
CATATATGGAGTTCCGCGTTACATAACTTACGGTAAATGGCCCGCCT
GGCTGACCGCCCAACGACCCCCGCCCATTGACGTCAATAATGACGTA
TGTTCCCATAGTAACGCCAATAGGGACTTTCCATTGACGTCAATGGG
TGGAGTATTTACGGTAAACTGCCCACTTGGCAGTACATCAAGTGTAT
CATATGCCAAGTACGCCCCCTATTGACGTCAATGACGGTAAATGGCC
CGCCTGGCATTATGCCCAGTACATGACCTTATGGGACTTTCCTACTT
GGCAGTACATCTACGTATTAGTCATCGCTATTACCATGGTGATGCGG
TTTTGGCAGTACATCAATGGGCGTGGATAGCGGTTTGACTCACGGGG
ATTTCCAAGTCTCCACCCCATTGACGTCAATGGGAGTTTGTTTTGGC
ACCAAAATCAACGGGACTTTCCAAAATGTCGTAACAACTCCGCCCCA
TTGACGCAAATGGGCGGTAGGCGTGTACGGTGGGAGGTCTATATAAG
CAGAGCTCGTTTAGTGAACCGTcagatcgcctggagacgcACCGGTG
CCACCATGGCCCCTAAGAAGAAGCGGAAAGTCGGCAGCGGCAAGCGG
AACTATATCCTGGGCCTCGACATCGGCATCACCAGCGTTGGCTACGG
CATCATCGACTACGAGACACGGGACGTGATCGATGCCGGCGTGCGGC
TGTTTAAAGAGGCCAACGTCGAGAACAACGAGGGCCGCAGATCTAAG
AGAGGCGCCAGACGGCTGAAGCGGAGAAGAAGGCACAGAATCCAGAG
AGTGAAGAAGCTGCTGTTCGACTACAACCTGCTGACCGACCACAGCG
AGCTGAGCGGCATCAATCCTTACGAGGCCAGAGTGAAGGGCCTGAGC
CAGAAGCTGAGCGAGGAAGAGTTTAGCGCCGCTCTGCTGCACCTGGC
CAAGAGAAGAGGCGTGCACAACGTGAACGAGGTGGAAGAGGACACCG
GCAACGAGCTGTCCACCAAAGAGCAGATCAGCCGGAACAGCAAGGCC
CTGGAAGAGAAATACGTGGCCGAACTGCAGCTGGAACGGCTGAAAAA
GGATGGCGAAGTGCGGGGCAGCATCAATCGGTTCAAGACCAGCGACT
ACGTGAAAGAAGCCAAACAGCTGCTGAAGGTGCAGAAGGCCTACCAC
CAGCTGGACCAGAGCTTCATCGACACCTACATCGACCTGCTGGAAAC
CCGGCGGACCTACTATGAAGGACCTGGCGAGGGAAGCCCCTTCGGCT
GGAAGGACATCAAAGAATGGTACGAGATGCTGATGGGCCACTGCACC
TACTTTCCCGAGGAACTGCGGAGCGTGAAGTACGCCTACAACGCCGA
CCTGTACAACGCCCTGAACGACCTGAACAACCTCGTGATCACCCGGG
ACGAGAACGAGAAGCTGGAATATTAGGAGAAGTTCCAGATCATCGAG
AACGTGTTCAAGCAGAAGAAGAAACCCACGCTGAAGCAGATCGCCAA
AGAGATCCTGGTCAACGAGGAAGATATCAAGGGCTACAGAGTGACCA
GCACCGGCAAGCCCGAGTTCACCAACCTGAAGGTGTACCACGACATC
AAGGATATCACAGCCCGGAAAGAGATTATTGAGAACGCCGAGCTGCT
GGACCAAATCGCCAAGATCCTGACCATCTACCAGAGCAGCGAGGACA
TCCAAGAGGAACTGACCAATCTGAACTCCGAGCTGACCCAAGAAGAG
ATCGAGCAGATCTCTAATCTGAAGGGGTACACCGGCACACACAACCT
GAGCCTGAAGGCCATCAACCTGATCCTGGACGAGCTGTGGCACACCA
ACGACAACCAGATTGCCATCTTCAACAGGCTGAAGCTGGTGCCCAAG
AAGGTGGACCTGTCTCAGCAGAAAGAAATCCCCACCACACTGGTGGA
CGACTTCATTCTGAGCCCCGTGGTCAAGAGGAGCTTCATCCAGAGCA
TCAAAGTGATCAACGCCATCATCAAGAAGTACGGGCTGCCCAACGAT
ATCATCATCGAGCTGGCCCGCGAGAAGAACTCCAAGGACGCCCAGAA
AATGATCAACGAGATGCAGAAGAGGAACCGCCAGACCAACGAGCGGA
TCGAGGAAATCATCCGGACCACCGGCAAAGAGAACGCCAAGTACCTG
ATCGAGAAGATCAAGCTGCACGACATGCAAGAGGGCAAGTGCCTGTA
CAGCCTGGAAGCCATTCCTCTGGAAGATCTGCTGAACAATCCCTTCA
ACTATGAGGTGGACCACATCATCCCCAGAAGCGTGTCCTTCGACAAC
AGCTTCAACAACAAGGTGCTCGTGAAGCAAGAGGAAAACAGCAAGAA
GGGCAACAGAACCCCATTCCAGTACCTGAGCAGCAGCGACAGCAAGA
TCAGCTACGAAACCTTCAAGAAGCACATCCTGAATCTGGCCAAAGGC
AAGGGCAGAATCAGCAAGACCAAGAAAGAATACCTGCTCGAGGAACG
GGACATCAACAGATTCAGCGTGCAGAAAGACTTCATCAATCGGAACC
TGGTGGACACCAGATACGCCACCAGAGGCCTGATGAATCTGCTGCGG
AGCTACTTCAGAGTGAACAATCTGGACGTGAAAGTCAAGTCCATCAA
CGGCGGCTTCACCAGCTTTCTGCGGCGGAAGTGGAAGTTCAAGAAAG
AGCGGAACAAGGGCTATAAGCACCACGCCGAGGACGCCCTGATCATT
GCCAACGCCGATTTCATCTTCAAAGAGTGGAAGAAACTGGACAAGGC
CAAAAAAGTGATGGAAAACCAGATGTTCGAGGAAAAGCAGGCCGAGA
GCATGCCCGAGATCGAAACCGAGCAAGAGTACAAAGAGATTTTCATC
ACGCCCCACCAGATCAAGCACATTAAGGACTTCAAGGACTACAAGTA
CAGCCACCGCGTGGACAAGAAGCCCAATAGAGAGCTGATTAACGACA
CCCTGTACTCTACCCGGAAGGACGACAAGGGCAATACCCTGATCGTC
AACAACCTGAACGGCCTGTACGACAAGGACAACGACAAGCTCAAGAA
GCTGATCAACAAGAGCCCCGAGAAACTGCTGATGTACCACCACGATC
CTCAGACCTACCAGAAACTGAAGCTCATCATGGAACAGTACGGCGAC
GAGAAGAATCCCCTGTACAAGTACTACGAGGAAACCGGGAACTACCT
GACCAAGTACTCCAAAAAGGACAATGGGCCCGTGATCAAGAAGATTA
AGTATTAGGGCAACAAGCTGAATGCCCACCTGGACATCACCGACGAC
TACCCCAACAGCAGAAACAAGGTGGTCAAGCTGTCCCTGAAGCCTTA
CAGATTCGACGTGTACCTGGACAACGGCGTGTACAAGTTCGTGACCG
TGAAGAACCTGGACGTCATCAAAAAAGAAAACTACTAGGAAGTCAAC
AGCAAGTGCTATGAGGAAGCCAAGAAACTCAAGAAAATCAGCAACCA
GGCCGAGTTTATCGCCTCCTTCTACAACAACGATCTGATCAAGATCA
ACGGGGAGCTGTATAGAGTGATCGGCGTGAACAATGACCTGCTGAAC
CGGATCGAAGTGAACATGATCGACATCACCTACCGCGAGTACCTCGA
GAACATGAACGATAAGCGGCCTCCACGGATCATTAAGACAATCGCCA
GCAAGACGCAGAGCATTAAGAAGTACAGCACAGACATCCTGGGCAAC
CTGTACGAAGTGAAGTCTAAGAAGCACCCGCAGATTATCAAGAAAGG
CAGCGGCGCTCCCAAGAAAAAACGGAAGGTTGGCTCCGGAGAGGGCA
GAGGAAGTCTGCTAACATGCGGTGACGTCGAGGAGAATCCTGGCCCA
ATGGAGAGCGACGAGAGCGGCCTGCCCGCCATGGAGATCGAGTGCCG
CATCACCGGCACCCTGAACGGCGTGGAGTTCGAGCTGGTGGGCGGCG
GAGAGGGCACCCCCGAGCAGGGCCGCATGACCAACAAGATGAAGAGC
ACCAAAGGCGCCCTGACCTTCAGCCCCTACCTGCTGAGCCACGTGAT
GGGCTACGGCTTCTACCACTTCGGCACCTACCCCAGCGGCTACGAGA
ACCCCTTCCTGCACGCCATCAACAACGGCGGCTACACCAACACCCGC
ATCGAGAAGTACGAGGACGGCGGCGTGCTGCACGTGAGCTTCAGCTA
CCGCTACGAGGCCGGCCGCGTGATCGGCGACTTCAAGGTGATGGGCA
CCGGCTTCCCCGAGGACAGCGTGATCTTCACCGACAAGATCATCCGC
AGCAACGCCACCGTGGAGCACCTGCACCCCATGGGCGATAACGATCT
GGATGGCAGCTTCACCCGCACCTTCAGCCTGCGCGACGGCGGCTACT
ACAGCTCCGTGGTGGACAGCCACATGCACTTCAAGAGCGCCATCCAC
CCCAGCATCCTGCAGAACGGGGGCCCCATGTTCGCCTTCCGCCGCGT
GGAGGAGGATCACAGCAACACCGAGCTGGGCATCGTGGAGTACCAGC
ACGCCTTCAAGACCCCGGATGCAGATGCCGGTGAAGAATAAGAGCTC
GCTGATCAGCCTCGATAAGATACATTGATGAGTTTGGACAAACCACA
ACTAGAATGCAGTGAAAAAAATGCTTTATTTGTGAAATTTGTGATGC
TATTGCTTTATTTGTAACCATTATAAGCTGCAATAAACAAGTTTTAA
TTAAGGTCGGGCAGGAAGAGGGCCTATTTCCCATGATTCCTTCATAT
TTGCATATACGATACAAGGCTGTTAGAGAGATAATTAGAATTAATTT
GACTGTAAACACAAAGATATTAGTACAAAATACGTGACGTAGAAAGT
AATAATTTCTTGGGTAGTTTGCAGTTTTAAAATTATGTTTTAAAATG
GACTATCATATGCTTACCGTAACTTGAAAGTATTTCGATTTCTTGGC
TTTATATATCTTGTGGAAAGGACGAAACACCGGCGCTACCGCCGCCT
GCAGAAGTTTAAGTACTCTGTGCTGGAAACAGCACAGAATCTAGTTA
AACAAGGCAAAATGCCGTGTTTATCTCGTCAACTTGTTGGCGAGATT
TTTTCtaAAGCTTGAATTCAGCTGACGTGCCTCGGACCGCTAGGAAC
CCCTAGTGATGGAGTTGGCCACTCCCTCTCTGCGCGCTCGCTCGCTC
ACTGAGGCCGGGCGACCAAAGGTCGCCCGACGCCCGGGCTTTGCCCG
GGCGGCCTCAGTGAGCGAGCGAGCGCGCAG
Exemplary pITR-CMV.SaCas9T2AGFP.U6-hsa447Fw
sequence
(SEQ ID NO: 286)
CTGCGCGCTCGCTCGCTCACTGAGGCCGCCCGGGCGTCGGGCGACCT
TTGGTCGCCCGGCCTCAGTGAGCGAGCGAGCGCGCAGAGAGGGAGTG
GCCAACTCCATCACTAGGGGTTCCTGCGGCCGCACGCGTCTAGATCC
CATATATGGAGTTCCGCGTTACATAACTTACGGTAAATGGCCCGCCT
GGCTGACCGCCCAACGACCCCCGCCCATTGACGTCAATAATGACGTA
TGTTCCCATAGTAACGCCAATAGGGACTTTCCATTGACGTCAATGGG
TGGAGTATTTACGGTAAACTGCCCACTTGGCAGTACATCAAGTGTAT
CATATGCCAAGTACGCCCCCTATTGACGTCAATGACGGTAAATGGCC
CGCCTGGCATTATGCCCAGTACATGACCTTATGGGACTTTCCTACTT
GGCAGTACATCTACGTATTAGTCATCGCTATTACCATGGTGATGCGG
TTTTGGCAGTACATCAATGGGCGTGGATAGCGGTTTGACTCACGGGG
ATTTCCAAGTCTCCACCCCATTGACGTCAATGGGAGTTTGTTTTGGC
ACCAAAATCAACGGGACTTTCCAAAATGTCGTAACAACTCCGCCCCA
TTGACGCAAATGGGCGGTAGGCGTGTACGGTGGGAGGTCTATATAAG
CAGAGCTCGTTTAGTGAACCGTcagatcgcctggagacgcACCGGTG
CCACCATGGCCCCTAAGAAGAAGCGGAAAGTCGGCAGCGGCAAGCGG
AACTATATCCTGGGCCTCGACATCGGCATCACCAGCGTTGGCTACGG
CATCATCGACTACGAGACACGGGACGTGATCGATGCCGGCGTGCGGC
TGTTTAAAGAGGCCAACGTCGAGAACAACGAGGGCCGCAGATCTAAG
AGAGGCGCCAGACGGCTGAAGCGGAGAAGAAGGCACAGAATCCAGAG
AGTGAAGAAGCTGCTGTTCGACTACAACCTGCTGACCGACCACAGCG
AGCTGAGCGGCATCAATCCTTACGAGGCCAGAGTGAAGGGCCTGAGC
CAGAAGCTGAGCGAGGAAGAGTTTAGCGCCGCTCTGCTGCACCTGGC
CAAGAGAAGAGGCGTGCACAACGTGAACGAGGTGGAAGAGGACACCG
GCAACGAGCTGTCCACCAAAGAGCAGATCAGCCGGAACAGCAAGGCC
CTGGAAGAGAAATACGTGGCCGAACTGCAGCTGGAACGGCTGAAAAA
GGATGGCGAAGTGCGGGGCAGCATCAATCGGTTCAAGACCAGCGACT
ACGTGAAAGAAGCCAAACAGCTGCTGAAGGTGCAGAAGGCCTACCAC
CAGCTGGACCAGAGCTTCATCGACACCTACATCGACCTGCTGGAAAC
CCGGCGGACCTACTATGAAGGACCTGGCGAGGGAAGCCCCTTCGGCT
GGAAGGACATCAAAGAATGGTACGAGATGCTGATGGGCCACTGCACC
TACTTTCCCGAGGAACTGCGGAGCGTGAAGTACGCCTACAACGCCGA
CCTGTACAACGCCCTGAACGACCTGAACAACCTCGTGATCACCCGGG
ACGAGAACGAGAAGCTGGAATATTAGGAGAAGTTCCAGATCATCGAG
AACGTGTTCAAGCAGAAGAAGAAACCCACGCTGAAGCAGATCGCCAA
AGAGATCCTGGTCAACGAGGAAGATATCAAGGGCTACAGAGTGACCA
GCACCGGCAAGCCCGAGTTCACCAACCTGAAGGTGTACCACGACATC
AAGGATATCACAGCCCGGAAAGAGATTATTGAGAACGCCGAGCTGCT
GGACCAAATCGCCAAGATCCTGACCATCTACCAGAGCAGCGAGGACA
TCCAAGAGGAACTGACCAATCTGAACTCCGAGCTGACCCAAGAAGAG
ATCGAGCAGATCTCTAATCTGAAGGGGTACACCGGCACACACAACCT
GAGCCTGAAGGCCATCAACCTGATCCTGGACGAGCTGTGGCACACCA
ACGACAACCAGATTGCCATCTTCAACAGGCTGAAGCTGGTGCCCAAG
AAGGTGGACCTGTCTCAGCAGAAAGAAATCCCCACCACACTGGTGGA
CGACTTCATTCTGAGCCCCGTGGTCAAGAGGAGCTTCATCCAGAGCA
TCAAAGTGATCAACGCCATCATCAAGAAGTACGGGCTGCCCAACGAT
ATCATCATCGAGCTGGCCCGCGAGAAGAACTCCAAGGACGCCCAGAA
AATGATCAACGAGATGCAGAAGAGGAACCGCCAGACCAACGAGCGGA
TCGAGGAAATCATCCGGACCACCGGCAAAGAGAACGCCAAGTACCTG
ATCGAGAAGATCAAGCTGCACGACATGCAAGAGGGCAAGTGCCTGTA
CAGCCTGGAAGCCATTCCTCTGGAAGATCTGCTGAACAATCCCTTCA
ACTATGAGGTGGACCACATCATCCCCAGAAGCGTGTCCTTCGACAAC
AGCTTCAACAACAAGGTGCTCGTGAAGCAAGAGGAAAACAGCAAGAA
GGGCAACAGAACCCCATTCCAGTACCTGAGCAGCAGCGACAGCAAGA
TCAGCTACGAAACCTTCAAGAAGCACATCCTGAATCTGGCCAAAGGC
AAGGGCAGAATCAGCAAGACCAAGAAAGAATACCTGCTCGAGGAACG
GGACATCAACAGATTCAGCGTGCAGAAAGACTTCATCAATCGGAACC
TGGTGGACACCAGATACGCCACCAGAGGCCTGATGAATCTGCTGCGG
AGCTACTTCAGAGTGAACAATCTGGACGTGAAAGTCAAGTCCATCAA
CGGCGGCTTCACCAGCTTTCTGCGGCGGAAGTGGAAGTTCAAGAAAG
AGCGGAACAAGGGCTATAAGCACCACGCCGAGGACGCCCTGATCATT
GCCAACGCCGATTTCATCTTCAAAGAGTGGAAGAAACTGGACAAGGC
CAAAAAAGTGATGGAAAACCAGATGTTCGAGGAAAAGCAGGCCGAGA
GCATGCCCGAGATCGAAACCGAGCAAGAGTACAAAGAGATTTTCATC
ACGCCCCACCAGATCAAGCACATTAAGGACTTCAAGGACTACAAGTA
CAGCCACCGCGTGGACAAGAAGCCCAATAGAGAGCTGATTAACGACA
CCCTGTACTCTACCCGGAAGGACGACAAGGGCAATACCCTGATCGTC
AACAACCTGAACGGCCTGTACGACAAGGACAACGACAAGCTCAAGAA
GCTGATCAACAAGAGCCCCGAGAAACTGCTGATGTACCACCACGATC
CTCAGACCTACCAGAAACTGAAGCTCATCATGGAACAGTACGGCGAC
GAGAAGAATCCCCTGTACAAGTACTACGAGGAAACCGGGAACTACCT
GACCAAGTACTCCAAAAAGGACAATGGGCCCGTGATCAAGAAGATTA
AGTATTAGGGCAACAAGCTGAATGCCCACCTGGACATCACCGACGAC
TACCCCAACAGCAGAAACAAGGTGGTCAAGCTGTCCCTGAAGCCTTA
CAGATTCGACGTGTACCTGGACAACGGCGTGTACAAGTTCGTGACCG
TGAAGAACCTGGACGTCATCAAAAAAGAAAACTACTAGGAAGTCAAC
AGCAAGTGCTATGAGGAAGCCAAGAAACTCAAGAAAATCAGCAACCA
GGCCGAGTTTATCGCCTCCTTCTACAACAACGATCTGATCAAGATCA
ACGGGGAGCTGTATAGAGTGATCGGCGTGAACAATGACCTGCTGAAC
CGGATCGAAGTGAACATGATCGACATCACCTACCGCGAGTACCTCGA
GAACATGAACGATAAGCGGCCTCCACGGATCATTAAGACAATCGCCA
GCAAGACGCAGAGCATTAAGAAGTACAGCACAGACATCCTGGGCAAC
CTGTACGAAGTGAAGTCTAAGAAGCACCCGCAGATTATCAAGAAAGG
CAGCGGCGCTCCCAAGAAAAAACGGAAGGTTGGCTCCGGAGAGGGCA
GAGGAAGTCTGCTAACATGCGGTGACGTCGAGGAGAATCCTGGCCCA
ATGGAGAGCGACGAGAGCGGCCTGCCCGCCATGGAGATCGAGTGCCG
CATCACCGGCACCCTGAACGGCGTGGAGTTCGAGCTGGTGGGCGGCG
GAGAGGGCACCCCCGAGCAGGGCCGCATGACCAACAAGATGAAGAGC
ACCAAAGGCGCCCTGACCTTCAGCCCCTACCTGCTGAGCCACGTGAT
GGGCTACGGCTTCTACCACTTCGGCACCTACCCCAGCGGCTACGAGA
ACCCCTTCCTGCACGCCATCAACAACGGCGGCTACACCAACACCCGC
ATCGAGAAGTACGAGGACGGCGGCGTGCTGCACGTGAGCTTCAGCTA
CCGCTACGAGGCCGGCCGCGTGATCGGCGACTTCAAGGTGATGGGCA
CCGGCTTCCCCGAGGACAGCGTGATCTTCACCGACAAGATCATCCGC
AGCAACGCCACCGTGGAGCACCTGCACCCCATGGGCGATAACGATCT
GGATGGCAGCTTCACCCGCACCTTCAGCCTGCGCGACGGCGGCTACT
ACAGCTCCGTGGTGGACAGCCACATGCACTTCAAGAGCGCCATCCAC
CCCAGCATCCTGCAGAACGGGGGCCCCATGTTCGCCTTCCGCCGCGT
GGAGGAGGATCACAGCAACACCGAGCTGGGCATCGTGGAGTACCAGC
ACGCCTTCAAGACCCCGGATGCAGATGCCGGTGAAGAATAAGAGCTC
GCTGATCAGCCTCGATAAGATACATTGATGAGTTTGGACAAACCACA
ACTAGAATGCAGTGAAAAAAATGCTTTATTTGTGAAATTTGTGATGC
TATTGCTTTATTTGTAACCATTATAAGCTGCAATAAACAAGTTTTAA
TTAAGGTCGGGCAGGAAGAGGGCCTATTTCCCATGATTCCTTCATAT
TTGCATATACGATACAAGGCTGTTAGAGAGATAATTAGAATTAATTT
GACTGTAAACACAAAGATATTAGTACAAAATACGTGACGTAGAAAGT
AATAATTTCTTGGGTAGTTTGCAGTTTTAAAATTATGTTTTAAAATG
GACTATCATATGCTTACCGTAACTTGAAAGTATTTCGATTTCTTGGC
TTTATATATCTTGTGGAAAGGACGAAACACCGTTTCGGCTTGGAGTA
CATCGTGTTTAAGTACTCTGTGCTGGAAACAGCACAGAATCTACTTA
AACAAGGCAAAATGCCGTGTTTATCTCGTCAACTTGTTGGCGAGATT
TTTTCTAAAGCTTGAATTCAGCTGACGTGCCTCGGACCGCTAGGAAC
CCCTAGTGATGGAGTTGGCCACTCCCTCTCTGCGCGCTCGCTCGCTC
ACTGAGGCCGGGCGACCAAAGGTCGCCCGACGCCCGGGCTTTGCCCG
GGCGGCCTCAGTGAGCGAGCGAGCGCGCAG
Exemplary pITR-CMV.SaCas9T2AGFP.U6-hsa482Fw
sequence
(SEQ ID NO: 287)
CTGCGCGCTCGCTCGCTCACTGAGGCCGCCCGGGCGTCGGGCGACCT
TTGGTCGCCCGGCCTCAGTGAGCGAGCGAGCGCGCAGAGAGGGAGTG
GCCAACTCCATCACTAGGGGTTCCTGCGGCCGCACGCGTCTAGATCC
CATATATGGAGTTCCGCGTTACATAACTTACGGTAAATGGCCCGCCT
GGCTGACCGCCCAACGACCCCCGCCCATTGACGTCAATAATGACGTA
TGTTCCCATAGTAACGCCAATAGGGACTTTCCATTGACGTCAATGGG
TGGAGTATTTACGGTAAACTGCCCACTTGGCAGTACATCAAGTGTAT
CATATGCCAAGTACGCCCCCTATTGACGTCAATGACGGTAAATGGCC
CGCCTGGCATTATGCCCAGTACATGACCTTATGGGACTTTCCTACTT
GGCAGTACATCTACGTATTAGTCATCGCTATTACCATGGTGATGCGG
TTTTGGCAGTACATCAATGGGCGTGGATAGCGGTTTGACTCACGGGG
ATTTCCAAGTCTCCACCCCATTGACGTCAATGGGAGTTTGTTTTGGC
ACCAAAATCAACGGGACTTTCCAAAATGTCGTAACAACTCCGCCCCA
TTGACGCAAATGGGCGGTAGGCGTGTACGGTGGGAGGTCTATATAAG
CAGAGCTCGTTTAGTGAACCGTcagatcgcctggagacgcACCGGTG
CCACCATGGCCCCTAAGAAGAAGCGGAAAGTCGGCAGCGGCAAGCGG
AACTATATCCTGGGCCTCGACATCGGCATCACCAGCGTTGGCTACGG
CATCATCGACTACGAGACACGGGACGTGATCGATGCCGGCGTGCGGC
TGTTTAAAGAGGCCAACGTCGAGAACAACGAGGGCCGCAGATCTAAG
AGAGGCGCCAGACGGCTGAAGCGGAGAAGAAGGCACAGAATCCAGAG
AGTGAAGAAGCTGCTGTTCGACTACAACCTGCTGACCGACCACAGCG
AGCTGAGCGGCATCAATCCTTACGAGGCCAGAGTGAAGGGCCTGAGC
CAGAAGCTGAGCGAGGAAGAGTTTAGCGCCGCTCTGCTGCACCTGGC
CAAGAGAAGAGGCGTGCACAACGTGAACGAGGTGGAAGAGGACACCG
GCAACGAGCTGTCCACCAAAGAGCAGATCAGCCGGAACAGCAAGGCC
CTGGAAGAGAAATACGTGGCCGAACTGCAGCTGGAACGGCTGAAAAA
GGATGGCGAAGTGCGGGGCAGCATCAATCGGTTCAAGACCAGCGACT
ACGTGAAAGAAGCCAAACAGCTGCTGAAGGTGCAGAAGGCCTACCAC
CAGCTGGACCAGAGCTTCATCGACACCTACATCGACCTGCTGGAAAC
CCGGCGGACCTACTATGAAGGACCTGGCGAGGGAAGCCCCTTCGGCT
GGAAGGACATCAAAGAATGGTACGAGATGCTGATGGGCCACTGCACC
TACTTTCCCGAGGAACTGCGGAGCGTGAAGTACGCCTACAACGCCGA
CCTGTACAACGCCCTGAACGACCTGAACAACCTCGTGATCACCCGGG
ACGAGAACGAGAAGCTGGAATATTAGGAGAAGTTCCAGATCATCGAG
AACGTGTTCAAGCAGAAGAAGAAACCCACGCTGAAGCAGATCGCCAA
AGAGATCCTGGTCAACGAGGAAGATATCAAGGGCTACAGAGTGACCA
GCACCGGCAAGCCCGAGTTCACCAACCTGAAGGTGTACCACGACATC
AAGGATATCACAGCCCGGAAAGAGATTATTGAGAACGCCGAGCTGCT
GGACCAAATCGCCAAGATCCTGACCATCTACCAGAGCAGCGAGGACA
TCCAAGAGGAACTGACCAATCTGAACTCCGAGCTGACCCAAGAAGAG
ATCGAGCAGATCTCTAATCTGAAGGGGTACACCGGCACACACAACCT
GAGCCTGAAGGCCATCAACCTGATCCTGGACGAGCTGTGGCACACCA
ACGACAACCAGATTGCCATCTTCAACAGGCTGAAGCTGGTGCCCAAG
AAGGTGGACCTGTCTCAGCAGAAAGAAATCCCCACCACACTGGTGGA
CGACTTCATTCTGAGCCCCGTGGTCAAGAGGAGCTTCATCCAGAGCA
TCAAAGTGATCAACGCCATCATCAAGAAGTACGGGCTGCCCAACGAT
ATCATCATCGAGCTGGCCCGCGAGAAGAACTCCAAGGACGCCCAGAA
AATGATCAACGAGATGCAGAAGAGGAACCGCCAGACCAACGAGCGGA
TCGAGGAAATCATCCGGACCACCGGCAAAGAGAACGCCAAGTACCTG
ATCGAGAAGATCAAGCTGCACGACATGCAAGAGGGCAAGTGCCTGTA
CAGCCTGGAAGCCATTCCTCTGGAAGATCTGCTGAACAATCCCTTCA
ACTATGAGGTGGACCACATCATCCCCAGAAGCGTGTCCTTCGACAAC
AGCTTCAACAACAAGGTGCTCGTGAAGCAAGAGGAAAACAGCAAGAA
GGGCAACAGAACCCCATTCCAGTACCTGAGCAGCAGCGACAGCAAGA
TCAGCTACGAAACCTTCAAGAAGCACATCCTGAATCTGGCCAAAGGC
AAGGGCAGAATCAGCAAGACCAAGAAAGAATACCTGCTCGAGGAACG
GGACATCAACAGATTCAGCGTGCAGAAAGACTTCATCAATCGGAACC
TGGTGGACACCAGATACGCCACCAGAGGCCTGATGAATCTGCTGCGG
AGCTACTTCAGAGTGAACAATCTGGACGTGAAAGTCAAGTCCATCAA
CGGCGGCTTCACCAGCTTTCTGCGGCGGAAGTGGAAGTTCAAGAAAG
AGCGGAACAAGGGCTATAAGCACCACGCCGAGGACGCCCTGATCATT
GCCAACGCCGATTTCATCTTCAAAGAGTGGAAGAAACTGGACAAGGC
CAAAAAAGTGATGGAAAACCAGATGTTCGAGGAAAAGCAGGCCGAGA
GCATGCCCGAGATCGAAACCGAGCAAGAGTACAAAGAGATTTTCATC
ACGCCCCACCAGATCAAGCACATTAAGGACTTCAAGGACTACAAGTA
CAGCCACCGCGTGGACAAGAAGCCCAATAGAGAGCTGATTAACGACA
CCCTGTACTCTACCCGGAAGGACGACAAGGGCAATACCCTGATCGTC
AACAACCTGAACGGCCTGTACGACAAGGACAACGACAAGCTCAAGAA
GCTGATCAACAAGAGCCCCGAGAAACTGCTGATGTACCACCACGATC
CTCAGACCTACCAGAAACTGAAGCTCATCATGGAACAGTACGGCGAC
GAGAAGAATCCCCTGTACAAGTACTACGAGGAAACCGGGAACTACCT
GACCAAGTACTCCAAAAAGGACAATGGGCCCGTGATCAAGAAGATTA
AGTATTAGGGCAACAAGCTGAATGCCCACCTGGACATCACCGACGAC
TACCCCAACAGCAGAAACAAGGTGGTCAAGCTGTCCCTGAAGCCTTA
CAGATTCGACGTGTACCTGGACAACGGCGTGTACAAGTTCGTGACCG
TGAAGAACCTGGACGTCATCAAAAAAGAAAACTACTAGGAAGTCAAC
AGCAAGTGCTATGAGGAAGCCAAGAAACTCAAGAAAATCAGCAACCA
GGCCGAGTTTATCGCCTCCTTCTACAACAACGATCTGATCAAGATCA
ACGGGGAGCTGTATAGAGTGATCGGCGTGAACAATGACCTGCTGAAC
CGGATCGAAGTGAACATGATCGACATCACCTACCGCGAGTACCTCGA
GAACATGAACGATAAGCGGCCTCCACGGATCATTAAGACAATCGCCA
GCAAGACGCAGAGCATTAAGAAGTACAGCACAGACATCCTGGGCAAC
CTGTACGAAGTGAAGTCTAAGAAGCACCCGCAGATTATCAAGAAAGG
CAGCGGCGCTCCCAAGAAAAAACGGAAGGTTGGCTCCGGAGAGGGCA
GAGGAAGTCTGCTAACATGCGGTGACGTCGAGGAGAATCCTGGCCCA
ATGGAGAGCGACGAGAGCGGCCTGCCCGCCATGGAGATCGAGTGCCG
CATCACCGGCACCCTGAACGGCGTGGAGTTCGAGCTGGTGGGCGGCG
GAGAGGGCACCCCCGAGCAGGGCCGCATGACCAACAAGATGAAGAGC
ACCAAAGGCGCCCTGACCTTCAGCCCCTACCTGCTGAGCCACGTGAT
GGGCTACGGCTTCTACCACTTCGGCACCTACCCCAGCGGCTACGAGA
ACCCCTTCCTGCACGCCATCAACAACGGCGGCTACACCAACACCCGC
ATCGAGAAGTACGAGGACGGCGGCGTGCTGCACGTGAGCTTCAGCTA
CCGCTACGAGGCCGGCCGCGTGATCGGCGACTTCAAGGTGATGGGCA
CCGGCTTCCCCGAGGACAGCGTGATCTTCACCGACAAGATCATCCGC
AGCAACGCCACCGTGGAGCACCTGCACCCCATGGGCGATAACGATCT
GGATGGCAGCTTCACCCGCACCTTCAGCCTGCGCGACGGCGGCTACT
ACAGCTCCGTGGTGGACAGCCACATGCACTTCAAGAGCGCCATCCAC
CCCAGCATCCTGCAGAACGGGGGCCCCATGTTCGCCTTCCGCCGCGT
GGAGGAGGATCACAGCAACACCGAGCTGGGCATCGTGGAGTACCAGC
ACGCCTTCAAGACCCCGGATGCAGATGCCGGTGAAGAATAAGAGCTC
GCTGATCAGCCTCGATAAGATACATTGATGAGTTTGGACAAACCACA
ACTAGAATGCAGTGAAAAAAATGCTTTATTTGTGAAATTTGTGATGC
TATTGCTTTATTTGTAACCATTATAAGCTGCAATAAACAAGTTTTAA
TTAAGGTCGGGCAGGAAGAGGGCCTATTTCCCATGATTCCTTCATAT
TTGCATATACGATACAAGGCTGTTAGAGAGATAATTAGAATTAATTT
GACTGTAAACACAAAGATATTAGTACAAAATACGTGACGTAGAAAGT
AATAATTTCTTGGGTAGTTTGCAGTTTTAAAATTATGTTTTAAAATG
GACTATCATATGCTTACCGTAACTTGAAAGTATTTCGATTTCTTGGC
TTTATATATCTTGTGGAAAGGACGAAACACCGCCGGATGCTGCTGCC
GCTACCGTTTAAGTACTCTGTGCTGGAAACAGCACAGAATCTACTTA
AACAAGGCAAAATGCCGTGTTTATCTCGTCAACTTGTTGGCGAGATT
TTTTCTAAAGCTTGAATTCAGCTGACGTGCCTCGGACCGCTAGGAAC
CCCTAGTGATGGAGTTGGCCACTCCCTCTCTGCGCGCTCGCTCGCTC
ACTGAGGCCGGGCGACCAAAGGTCGCCCGACGCCCGGGCTTTGCCCG
GGCGGCCTCAGTGAGCGAGCGAGCGCGCAG
Exemplary pITR-CMV.SaCas9T2AGFP.U6-hsa490Fw
sequence
(SEQ ID NO: 288)
CTGCGCGCTCGCTCGCTCACTGAGGCCGCCCGGGCGTCGGGCGACCT
TTGGTCGCCCGGCCTCAGTGAGCGAGCGAGCGCGCAGAGAGGGAGTG
GCCAACTCCATCACTAGGGGTTCCTGCGGCCGCACGCGTCTAGATCC
CATATATGGAGTTCCGCGTTACATAACTTACGGTAAATGGCCCGCCT
GGCTGACCGCCCAACGACCCCCGCCCATTGACGTCAATAATGACGTA
TGTTCCCATAGTAACGCCAATAGGGACTTTCCATTGACGTCAATGGG
TGGAGTATTTACGGTAAACTGCCCACTTGGCAGTACATCAAGTGTAT
CATATGCCAAGTACGCCCCCTATTGACGTCAATGACGGTAAATGGCC
CGCCTGGCATTATGCCCAGTACATGACCTTATGGGACTTTCCTACTT
GGCAGTACATCTACGTATTAGTCATCGCTATTACCATGGTGATGCGG
TTTTGGCAGTACATCAATGGGCGTGGATAGCGGTTTGACTCACGGGG
ATTTCCAAGTCTCCACCCCATTGACGTCAATGGGAGTTTGTTTTGGC
ACCAAAATCAACGGGACTTTCCAAAATGTCGTAACAACTCCGCCCCA
TTGACGCAAATGGGCGGTAGGCGTGTACGGTGGGAGGTCTATATAAG
CAGAGCTCGTTTAGTGAACCGTcagatcgcctggagacgcACCGGTG
CCACCATGGCCCCTAAGAAGAAGCGGAAAGTCGGCAGCGGCAAGCGG
AACTATATCCTGGGCCTCGACATCGGCATCACCAGCGTTGGCTACGG
CATCATCGACTACGAGACACGGGACGTGATCGATGCCGGCGTGCGGC
TGTTTAAAGAGGCCAACGTCGAGAACAACGAGGGCCGCAGATCTAAG
AGAGGCGCCAGACGGCTGAAGCGGAGAAGAAGGCACAGAATCCAGAG
AGTGAAGAAGCTGCTGTTCGACTACAACCTGCTGACCGACCACAGCG
AGCTGAGCGGCATCAATCCTTACGAGGCCAGAGTGAAGGGCCTGAGC
CAGAAGCTGAGCGAGGAAGAGTTTAGCGCCGCTCTGCTGCACCTGGC
CAAGAGAAGAGGCGTGCACAACGTGAACGAGGTGGAAGAGGACACCG
GCAACGAGCTGTCCACCAAAGAGCAGATCAGCCGGAACAGCAAGGCC
CTGGAAGAGAAATACGTGGCCGAACTGCAGCTGGAACGGCTGAAAAA
GGATGGCGAAGTGCGGGGCAGCATCAATCGGTTCAAGACCAGCGACT
ACGTGAAAGAAGCCAAACAGCTGCTGAAGGTGCAGAAGGCCTACCAC
CAGCTGGACCAGAGCTTCATCGACACCTACATCGACCTGCTGGAAAC
CCGGCGGACCTACTATGAAGGACCTGGCGAGGGAAGCCCCTTCGGCT
GGAAGGACATCAAAGAATGGTACGAGATGCTGATGGGCCACTGCACC
TACTTTCCCGAGGAACTGCGGAGCGTGAAGTACGCCTACAACGCCGA
CCTGTACAACGCCCTGAACGACCTGAACAACCTCGTGATCACCCGGG
ACGAGAACGAGAAGCTGGAATATTAGGAGAAGTTCCAGATCATCGAG
AACGTGTTCAAGCAGAAGAAGAAACCCACGCTGAAGCAGATCGCCAA
AGAGATCCTGGTCAACGAGGAAGATATCAAGGGCTACAGAGTGACCA
GCACCGGCAAGCCCGAGTTCACCAACCTGAAGGTGTACCACGACATC
AAGGATATCACAGCCCGGAAAGAGATTATTGAGAACGCCGAGCTGCT
GGACCAAATCGCCAAGATCCTGACCATCTACCAGAGCAGCGAGGACA
TCCAAGAGGAACTGACCAATCTGAACTCCGAGCTGACCCAAGAAGAG
ATCGAGCAGATCTCTAATCTGAAGGGGTACACCGGCACACACAACCT
GAGCCTGAAGGCCATCAACCTGATCCTGGACGAGCTGTGGCACACCA
ACGACAACCAGATTGCCATCTTCAACAGGCTGAAGCTGGTGCCCAAG
AAGGTGGACCTGTCTCAGCAGAAAGAAATCCCCACCACACTGGTGGA
CGACTTCATTCTGAGCCCCGTGGTCAAGAGGAGCTTCATCCAGAGCA
TCAAAGTGATCAACGCCATCATCAAGAAGTACGGGCTGCCCAACGAT
ATCATCATCGAGCTGGCCCGCGAGAAGAACTCCAAGGACGCCCAGAA
AATGATCAACGAGATGCAGAAGAGGAACCGCCAGACCAACGAGCGGA
TCGAGGAAATCATCCGGACCACCGGCAAAGAGAACGCCAAGTACCTG
ATCGAGAAGATCAAGCTGCACGACATGCAAGAGGGCAAGTGCCTGTA
CAGCCTGGAAGCCATTCCTCTGGAAGATCTGCTGAACAATCCCTTCA
ACTATGAGGTGGACCACATCATCCCCAGAAGCGTGTCCTTCGACAAC
AGCTTCAACAACAAGGTGCTCGTGAAGCAAGAGGAAAACAGCAAGAA
GGGCAACAGAACCCCATTCCAGTACCTGAGCAGCAGCGACAGCAAGA
TCAGCTACGAAACCTTCAAGAAGCACATCCTGAATCTGGCCAAAGGC
AAGGGCAGAATCAGCAAGACCAAGAAAGAATACCTGCTCGAGGAACG
GGACATCAACAGATTCAGCGTGCAGAAAGACTTCATCAATCGGAACC
TGGTGGACACCAGATACGCCACCAGAGGCCTGATGAATCTGCTGCGG
AGCTACTTCAGAGTGAACAATCTGGACGTGAAAGTCAAGTCCATCAA
CGGCGGCTTCACCAGCTTTCTGCGGCGGAAGTGGAAGTTCAAGAAAG
AGCGGAACAAGGGCTATAAGCACCACGCCGAGGACGCCCTGATCATT
GCCAACGCCGATTTCATCTTCAAAGAGTGGAAGAAACTGGACAAGGC
CAAAAAAGTGATGGAAAACCAGATGTTCGAGGAAAAGCAGGCCGAGA
GCATGCCCGAGATCGAAACCGAGCAAGAGTACAAAGAGATTTTCATC
ACGCCCCACCAGATCAAGCACATTAAGGACTTCAAGGACTACAAGTA
CAGCCACCGCGTGGACAAGAAGCCCAATAGAGAGCTGATTAACGACA
CCCTGTACTCTACCCGGAAGGACGACAAGGGCAATACCCTGATCGTC
AACAACCTGAACGGCCTGTACGACAAGGACAACGACAAGCTCAAGAA
GCTGATCAACAAGAGCCCCGAGAAACTGCTGATGTACCACCACGATC
CTCAGACCTACCAGAAACTGAAGCTCATCATGGAACAGTACGGCGAC
GAGAAGAATCCCCTGTACAAGTACTACGAGGAAACCGGGAACTACCT
GACCAAGTACTCCAAAAAGGACAATGGGCCCGTGATCAAGAAGATTA
AGTATTAGGGCAACAAGCTGAATGCCCACCTGGACATCACCGACGAC
TACCCCAACAGCAGAAACAAGGTGGTCAAGCTGTCCCTGAAGCCTTA
CAGATTCGACGTGTACCTGGACAACGGCGTGTACAAGTTCGTGACCG
TGAAGAACCTGGACGTCATCAAAAAAGAAAACTACTAGGAAGTCAAC
AGCAAGTGCTATGAGGAAGCCAAGAAACTCAAGAAAATCAGCAACCA
GGCCGAGTTTATCGCCTCCTTCTACAACAACGATCTGATCAAGATCA
ACGGGGAGCTGTATAGAGTGATCGGCGTGAACAATGACCTGCTGAAC
CGGATCGAAGTGAACATGATCGACATCACCTACCGCGAGTACCTCGA
GAACATGAACGATAAGCGGCCTCCACGGATCATTAAGACAATCGCCA
GCAAGACGCAGAGCATTAAGAAGTACAGCACAGACATCCTGGGCAAC
CTGTACGAAGTGAAGTCTAAGAAGCACCCGCAGATTATCAAGAAAGG
CAGCGGCGCTCCCAAGAAAAAACGGAAGGTTGGCTCCGGAGAGGGCA
GAGGAAGTCTGCTAACATGCGGTGACGTCGAGGAGAATCCTGGCCCA
ATGGAGAGCGACGAGAGCGGCCTGCCCGCCATGGAGATCGAGTGCCG
CATCACCGGCACCCTGAACGGCGTGGAGTTCGAGCTGGTGGGCGGCG
GAGAGGGCACCCCCGAGCAGGGCCGCATGACCAACAAGATGAAGAGC
ACCAAAGGCGCCCTGACCTTCAGCCCCTACCTGCTGAGCCACGTGAT
GGGCTACGGCTTCTACCACTTCGGCACCTACCCCAGCGGCTACGAGA
ACCCCTTCCTGCACGCCATCAACAACGGCGGCTACACCAACACCCGC
ATCGAGAAGTACGAGGACGGCGGCGTGCTGCACGTGAGCTTCAGCTA
CCGCTACGAGGCCGGCCGCGTGATCGGCGACTTCAAGGTGATGGGCA
CCGGCTTCCCCGAGGACAGCGTGATCTTCACCGACAAGATCATCCGC
AGCAACGCCACCGTGGAGCACCTGCACCCCATGGGCGATAACGATCT
GGATGGCAGCTTCACCCGCACCTTCAGCCTGCGCGACGGCGGCTACT
ACAGCTCCGTGGTGGACAGCCACATGCACTTCAAGAGCGCCATCCAC
CCCAGCATCCTGCAGAACGGGGGCCCCATGTTCGCCTTCCGCCGCGT
GGAGGAGGATCACAGCAACACCGAGCTGGGCATCGTGGAGTACCAGC
ACGCCTTCAAGACCCCGGATGCAGATGCCGGTGAAGAATAAGAGCTC
GCTGATCAGCCTCGATAAGATACATTGATGAGTTTGGACAAACCACA
ACTAGAATGCAGTGAAAAAAATGCTTTATTTGTGAAATTTGTGATGC
TATTGCTTTATTTGTAACCATTATAAGCTGCAATAAACAAGTTTTAA
TTAAGGTCGGGCAGGAAGAGGGCCTATTTCCCATGATTCCTTCATAT
TTGCATATACGATACAAGGCTGTTAGAGAGATAATTAGAATTAATTT
GACTGTAAACACAAAGATATTAGTACAAAATACGTGACGTAGAAAGT
AATAATTTCTTGGGTAGTTTGCAGTTTTAAAATTATGTTTTAAAATG
GACTATCATATGCTTACCGTAACTTGAAAGTATTTCGATTTCTTGGC
TTTATATATCTTGTGGAAAGGACGAAACACCGTGCTGCCGCTACCGA
GGATGGGTTTAAGTACTCTGTGCTGGAAACAGCACAGAATCTAGTTA
AACAAGGCAAAATGCCGTGTTTATCTCGTCAACTTGTTGGCGAGATT
TTTTCTAAAGCTTGAATTCAGCTGACGTGCCTCGGACCGCTAGGAAC
CCCTAGTGATGGAGTTGGCCACTCCCTCTCTGCGCGCTCGCTCGCTC
ACTGAGGCCGGGCGACCAAAGGTCGCCCGACGCCCGGGCTTTGCCCG
GGCGGCCTCAGTGAGCGAGCGAGCGCGCAG

[0375] Exemplary eGFP with sgRNA plasmids

Exemplary pITR.CMV.eGFP.U6-hsammu386Fw
sequence
(SEQ ID NO: 289)
CTGCGCGCTCGCTCGCTCACTGAGGCCGCCCGGGCGTCGGGCGACCT
TTGGTCGCCCGGCCTCAGTGAGCGAGCGAGCGCGCAGAGAGGGAGTG
GCCAACTCCATCACTAGGGGTTCCTGCGGCCGCACGCGTCTAGATCC
CATATATGGAGTTCCGCGTTACATAACTTACGGTAAATGGCCCGCCT
GGCTGACCGCCCAACGACCCCCGCCCATTGACGTCAATAATGACGTA
TGTTCCCATAGTAACGCCAATAGGGACTTTCCATTGACGTCAATGGG
TGGAGTATTTACGGTAAACTGCCCACTTGGCAGTACATCAAGTGTAT
CATATGCCAAGTACGCCCCCTATTGACGTCAATGACGGTAAATGGCC
CGCCTGGCATTATGCCCAGTACATGACCTTATGGGACTTTCCTACTT
GGCAGTACATCTACGTATTAGTCATCGCTATTACCATGGTGATGCGG
TTTTGGCAGTACATCAATGGGCGTGGATAGCGGTTTGACTCACGGGG
ATTTCCAAGTCTCCACCCCATTGACGTCAATGGGAGTTTGTTTTGGC
ACCAAAATCAACGGGACTTTCCAAAATGTCGTAACAACTCCGCCCCA
TTGACGCAAATGGGCGGTAGGCGTGTACGGTGGGAGGTCTATATAAG
CAGAGCTCGTTTAGTGAACCGTCGTTTAGTGAACCGTcagatcgcct
ggagacgcACCGGTGCCACCATGGTGAGCAAGGGCGAGGAGCTGTTC
ACCGGGGTGGTGCCCATCCTGGTCGAGCTGGACGGCGACGTAAACGG
CCACAAGTTCAGCGTGTCCGGCGAGGGCGAGGGCGATGCCACCTACG
GCAAGCTGACCCTGAAGTTCATCTGCACCACCGGCAAGCTGCCCGTG
CCCTGGCCCACCCTCGTGACCACCCTGACCTACGGCGTGCAGTGCTT
CAGCCGCTACCCCGACCACATGAAGCAGCACGACTTCTTCAAGTCCG
CCATGCCCGAAGGCTACGTCCAGGAGCGCACCATCTTCTTCAAGGAC
GACGGCAACTACAAGACCCGCGCCGAGGTGAAGTTCGAGGGCGACAC
CCTGGTGAACCGCATCGAGCTGAAGGGCATCGACTTCAAGGAGGACG
GCAACATCCTGGGGCACAAGCTGGAGTACAACTACAACAGCCACAAC
GTCTATATCATGGCCGACAAGCAGAAGAACGGCATCAAGGTGAACTT
CAAGATCCGCCACAACATCGAGGACGGCAGCGTGCAGCTCGCCGACC
ACTACCAGCAGAACACCCCCATCGGCGACGGCCCCGTGCTGCTGCCC
GACAACCACTACCTGAGCACCCAGTCCGCCCTGAGCAAAGACCCCAA
CGAGAAGCGCGATCACATGGTCCTGCTGGAGTTCGTGACCGCCGCCG
GGATCACTCTCGGCATGGACGAGCTGTACAAGTAATAATAAGAGCTC
GCTGATCAGCCTCGACTGTGCCTTCTAGTTGCCAGCCATCTGTTGTT
TGCCCCTCCCCCGTGCCTTCCTTGACCCTGGAAGGTGCCACTCCCAC
TGTCCTTTCCTAATAAAATGAGGAAATTGCATCGCATTGTCTGAGTA
GGTGTCATTCTATTCTGGGGGGTGGGGTGGGGCAGGACAGCAAGGGG
GAGGATTGGGAAGACAATAGCAGGCATGCTGGGGATGCGGTGGGCTC
TATGGTTAATTAAGGTCGGGCAGGAAGAGGGCCTATTTCCCATGATT
CCTTCATATTTGCATATACGATACAAGGCTGTTAGAGAGATAATTAG
AATTAATTTGACTGTAAACACAAAGATATTAGTACAAAATACGTGAC
GTAGAAAGTAATAATTTCTTGGGTAGTTTGCAGTTTTAAAATTATGT
TTTAAAATGGACTATCATATGCTTACCGTAACTTGAAAGTATTTCGA
TTTCTTGGCTTTATATATCTTGTGGAAAGGACGAAACACCGAGGAGC
ACCAGGAACTTGCCAGTTTAAGTACTCTGTGCTGGAAACAGCACAGA
ATCTACTTAAACAAGGCAAAATGCCGTGTTTATCTCGTCAACTTGTT
GGCGAGATTTTTTCTAAAGCTTGAATTCAAGCTTGAATTCAGCTGAC
GTGCCTCGGACCGCTAGGAACCCCTAGTGATGGAGTTGGCCACTCCC
TCTCTGCGCGCTCGCTCGCTCACTGAGGCCGGGCGACCAAAGGTCGC
CCGACGCCCGGGCTTTGCCCGGGCGGCCTCAGTGAGCGAGCGAGCGC
GCAG
Exemplary pITR.CMV.eGFP.U6-hsa408Rev
sequence
(SEQ ID NO: 290)
CTGCGCGCTCGCTCGCTCACTGAGGCCGCCCGGGCGTCGGGCGACCT
TTGGTCGCCCGGCCTCAGTGAGCGAGCGAGCGCGCAGAGAGGGAGTG
GCCAACTCCATCACTAGGGGTTCCTGCGGCCGCACGCGTCTAGATCC
CATATATGGAGTTCCGCGTTACATAACTTACGGTAAATGGCCCGCCT
GGCTGACCGCCCAACGACCCCCGCCCATTGACGTCAATAATGACGTA
TGTTCCCATAGTAACGCCAATAGGGACTTTCCATTGACGTCAATGGG
TGGAGTATTTACGGTAAACTGCCCACTTGGCAGTACATCAAGTGTAT
CATATGCCAAGTACGCCCCCTATTGACGTCAATGACGGTAAATGGCC
CGCCTGGCATTATGCCCAGTACATGACCTTATGGGACTTTCCTACTT
GGCAGTACATCTACGTATTAGTCATCGCTATTACCATGGTGATGCGG
TTTTGGCAGTACATCAATGGGCGTGGATAGCGGTTTGACTCACGGGG
ATTTCCAAGTCTCCACCCCATTGACGTCAATGGGAGTTTGTTTTGGC
ACCAAAATCAACGGGACTTTCCAAAATGTCGTAACAACTCCGCCCCA
TTGACGCAAATGGGCGGTAGGCGTGTACGGTGGGAGGTCTATATAAG
CAGAGCTCGTTTAGTGAACCGTCGTTTAGTGAACCGTcagatcgcct
ggagacgcACCGGTGCCACCATGGTGAGCAAGGGCGAGGAGCTGTTC
ACCGGGGTGGTGCCCATCCTGGTCGAGCTGGACGGCGACGTAAACGG
CCACAAGTTCAGCGTGTCCGGCGAGGGCGAGGGCGATGCCACCTACG
GCAAGCTGACCCTGAAGTTCATCTGCACCACCGGCAAGCTGCCCGTG
CCCTGGCCCACCCTCGTGACCACCCTGACCTACGGCGTGCAGTGCTT
CAGCCGCTACCCCGACCACATGAAGCAGCACGACTTCTTCAAGTCCG
CCATGCCCGAAGGCTACGTCCAGGAGCGCACCATCTTCTTCAAGGAC
GACGGCAACTACAAGACCCGCGCCGAGGTGAAGTTCGAGGGCGACAC
CCTGGTGAACCGCATCGAGCTGAAGGGCATCGACTTCAAGGAGGACG
GCAACATCCTGGGGCACAAGCTGGAGTACAACTACAACAGCCACAAC
GTCTATATCATGGCCGACAAGCAGAAGAACGGCATCAAGGTGAACTT
CAAGATCCGCCACAACATCGAGGACGGCAGCGTGCAGCTCGCCGACC
ACTACCAGCAGAACACCCCCATCGGCGACGGCCCCGTGCTGCTGCCC
GACAACCACTACCTGAGCACCCAGTCCGCCCTGAGCAAAGACCCCAA
CGAGAAGCGCGATCACATGGTCCTGCTGGAGTTCGTGACCGCCGCCG
GGATCACTCTCGGCATGGACGAGCTGTACAAGTAATAATAAGAGCTC
GCTGATCAGCCTCGACTGTGCCTTCTAGTTGCCAGCCATCTGTTGTT
TGCCCCTCCCCCGTGCCTTCCTTGACCCTGGAAGGTGCCACTCCCAC
TGTCCTTTCCTAATAAAATGAGGAAATTGCATCGCATTGTCTGAGTA
GGTGTCATTCTATTCTGGGGGGTGGGGTGGGGCAGGACAGCAAGGGG
GAGGATTGGGAAGACAATAGCAGGCATGCTGGGGATGCGGTGGGCTC
TATGGTTAATTAAGGTCGGGCAGGAAGAGGGCCTATTTCCCATGATT
CCTTCATATTTGCATATACGATACAAGGCTGTTAGAGAGATAATTAG
AATTAATTTGACTGTAAACACAAAGATATTAGTACAAAATACGTGAC
GTAGAAAGTAATAATTTCTTGGGTAGTTTGCAGTTTTAAAATTATGT
TTTAAAATGGACTATCATATGCTTACCGTAACTTGAAAGTATTTCGA
TTTCTTGGCTTTATATATCTTGTGGAAAGGACGAAACACCGAAGCCG
AAAACCACGATCATCGTTTAAGTACTCTGTGCTGGAAACAGCACAGA
ATCTACTTAAACAAGGCAAAATGCCGTGTTTATCTCGTCAACTTGTT
GGCGAGATTTTTTCTAAAGCTTGAATTCAAGCTTGAATTCAGCTGAC
GTGCCTCGGACCGCTAGGAACCCCTAGTGATGGAGTTGGCCACTCCC
TCTCTGCGCGCTCGCTCGCTCACTGAGGCCGGGCGACCAAAGGTCGC
CCGACGCCCGGGCTTTGCCCGGGCGGCCTCAGTGAGCGAGCGAGCGC
GCAG
Exemplary pITR.CMV.eGFP.U6-mmu408Rev
sequence
(SEQ ID NO: 291)
CTGCGCGCTCGCTCGCTCACTGAGGCCGCCCGGGCGTCGGGCGACCT
TTGGTCGCCCGGCCTCAGTGAGCGAGCGAGCGCGCAGAGAGGGAGTG
GCCAACTCCATCACTAGGGGTTCCTGCGGCCGCACGCGTCTAGATCC
CATATATGGAGTTCCGCGTTACATAACTTACGGTAAATGGCCCGCCT
GGCTGACCGCCCAACGACCCCCGCCCATTGACGTCAATAATGACGTA
TGTTCCCATAGTAACGCCAATAGGGACTTTCCATTGACGTCAATGGG
TGGAGTATTTACGGTAAACTGCCCACTTGGCAGTACATCAAGTGTAT
CATATGCCAAGTACGCCCCCTATTGACGTCAATGACGGTAAATGGCC
CGCCTGGCATTATGCCCAGTACATGACCTTATGGGACTTTCCTACTT
GGCAGTACATCTACGTATTAGTCATCGCTATTACCATGGTGATGCGG
TTTTGGCAGTACATCAATGGGCGTGGATAGCGGTTTGACTCACGGGG
ATTTCCAAGTCTCCACCCCATTGACGTCAATGGGAGTTTGTTTTGGC
ACCAAAATCAACGGGACTTTCCAAAATGTCGTAACAACTCCGCCCCA
TTGACGCAAATGGGCGGTAGGCGTGTACGGTGGGAGGTCTATATAAG
CAGAGCTCGTTTAGTGAACCGTCGTTTAGTGAACCGTcagatcgcct
ggagacgcACCGGTGCCACCATGGTGAGCAAGGGCGAGGAGCTGTTC
ACCGGGGTGGTGCCCATCCTGGTCGAGCTGGACGGCGACGTAAACGG
CCACAAGTTCAGCGTGTCCGGCGAGGGCGAGGGCGATGCCACCTACG
GCAAGCTGACCCTGAAGTTCATCTGCACCACCGGCAAGCTGCCCGTG
CCCTGGCCCACCCTCGTGACCACCCTGACCTACGGCGTGCAGTGCTT
CAGCCGCTACCCCGACCACATGAAGCAGCACGACTTCTTCAAGTCCG
CCATGCCCGAAGGCTACGTCCAGGAGCGCACCATCTTCTTCAAGGAC
GACGGCAACTACAAGACCCGCGCCGAGGTGAAGTTCGAGGGCGACAC
CCTGGTGAACCGCATCGAGCTGAAGGGCATCGACTTCAAGGAGGACG
GCAACATCCTGGGGCACAAGCTGGAGTACAACTACAACAGCCACAAC
GTCTATATCATGGCCGACAAGCAGAAGAACGGCATCAAGGTGAACTT
CAAGATCCGCCACAACATCGAGGACGGCAGCGTGCAGCTCGCCGACC
ACTACCAGCAGAACACCCCCATCGGCGACGGCCCCGTGCTGCTGCCC
GACAACCACTACCTGAGCACCCAGTCCGCCCTGAGCAAAGACCCCAA
CGAGAAGCGCGATCACATGGTCCTGCTGGAGTTCGTGACCGCCGCCG
GGATCACTCTCGGCATGGACGAGCTGTACAAGTAATAATAAGAGCTC
GCTGATCAGCCTCGACTGTGCCTTCTAGTTGCCAGCCATCTGTTGTT
TGCCCCTCCCCCGTGCCTTCCTTGACCCTGGAAGGTGCCACTCCCAC
TGTCCTTTCCTAATAAAATGAGGAAATTGCATCGCATTGTCTGAGTA
GGTGTCATTCTATTCTGGGGGGTGGGGTGGGGCAGGACAGCAAGGGG
GAGGATTGGGAAGACAATAGCAGGCATGCTGGGGATGCGGTGGGCTC
TATGGTTAATTAAGGTCGGGCAGGAAGAGGGCCTATTTCCCATGATT
CCTTCATATTTGCATATACGATACAAGGCTGTTAGAGAGATAATTAG
AATTAATTTGACTGTAAACACAAAGATATTAGTACAAAATACGTGAC
GTAGAAAGTAATAATTTCTTGGGTAGTTTGCAGTTTTAAAATTATGT
TTTAAAATGGACTATCATATGCTTACCGTAACTTGAAAGTATTTCGA
TTTCTTGGCTTTATATATCTTGTGGAAAGGACGAAACACCGAAGCCA
AAGACCACAATCATCGTTTAAGTACTCTGTGCTGGAAACAGCACAGA
ATCTACTTAAACAAGGCAAAATGCCGTGTTTATCTCGTCAACTTGTT
GGCGAGATTTTTTCTAAAGCTTGAATTCAAGCTTGAATTCAGCTGAC
GTGCCTCGGACCGCTAGGAACCCCTAGTGATGGAGTTGGCCACTCCC
TCTCTGCGCGCTCGCTCGCTCACTGAGGCCGGGCGACCAAAGGTCGC
CCGACGCCCGGGCTTTGCCCGGGCGGCCTCAGTGAGCGAGCGAGCGC
GCAG

xxi. AAV Particles

[0376] Among other things, the present disclosure provides AAV particles that comprise a construct encoding a KCNQ4 gene or characteristic portion thereof and/or an inhibitory nucleic acid sequence as described herein, and a capsid described herein. In some embodiments, AAV particles can be described as having a serotype, which is a description of a construct strain (e.g., serotype of viral components, e.g., ITRs), and a capsid strain. For example, in some embodiments an AAV particle may be described as AAV2, wherein the particle has an AAV2 capsid and a construct that comprises characteristic AAV2 Inverted Terminal Repeats (ITRs). In some embodiments, an AAV particle may be described as a pseudotype, wherein a capsid and construct are derived from different AAV strains, for example, AAV2/9 would refer to an AAV particle that comprises a construct utilizing AAV2 ITRs and an AAV9 capsid. In some embodiments, an AAV particle is described as Anc80, wherein a particle has an Anc80 capsid and AAV2 ITRs. In some embodiments, a construct may be described, e.g., as provided herein, without specific mention of a serotype of, e.g., an ITR in the name of the construct; however, it will be evident to one of skill in the art, reading the disclosure, what type of ITR is present in a given construct, e.g., AAV2 ITR. In some embodiments, an AAV particle of the present disclosure comprises at least one construct, which construct can be or comprise any sequence disclosed herein.

e. KCNQ4 Genome Editing

[0377] In some embodiments, a genome editing system targets nucleotides within a specific target site. In some such embodiments, a target site is or comprises a loss-of-function KCNQ4 variant sequence.

[0378] In some embodiments, a genome editing system comprises a nucleic acid strand that is complementary to a target site in a KCNQ4 gene product (e.g., complementary to a nucleotide sequence that is at least 85%, 90%, 91%, 92%, 93%, 94%, 95%, 96%, 97%, 98%, 99%, or 100% identical to a portion of any of SEQ ID NOs: 1-10 and/or 25-30 and/or 90-91) or a characteristic portion thereof. In some embodiments, a target site may be 15-30 nucleotides long, e.g., 15, 16, 17, 18, 19, 20, 21, 22, 23, 24, 25, 26, 27, 28, 29, or 30 nucleotides long, although shorter and longer target sites are also contemplated.

[0379] In some embodiments, a genome editing system comprises a nucleic acid strand that comprises a region that is perfectly complementary to at least 6, 7, 8, 9, 10, 11, 12, 13 14, 15, 16, 17, 18, 19, 20, 21, 22, 23, 24, 25, 26, 27, 28, 29, or 30 consecutive nucleotides of a KCNQ4 gene product. In some embodiments, a KCNQ gene product is or comprises any of SEQ ID NOs: 1-10 and/or 25-30 and/or 90-91 or a characteristic portion thereof). In some embodiments such an RNA-guided nuclease system is capable of inhibiting expression of KCNQ4 of one or more non-human species, e.g., a non-human primate KCNQ4, e.g., Macaca fascicularis KCNQ4, in addition to human KCNQ4. The Macaca fascicularis KCNQ4 gene has been assigned NCBI Gene ID: 102143586 and predicted amino acid and nucleotide sequences of Macaca fascicularis KCNQ4 are listed under NCBI RefSeq accession numbers XP_005543852 and XM_005543795.2, respectively.

[0380] In some embodiments, a genome editing system is complementary to a target site that is identical in human and Macaca fascicularis KCNQ4 transcripts. In some embodiments, a genome editing system is complementary to a target site of a human KCNQ4 transcript that differs by 1, 2, or 3 nucleotides from a sequence in a Macaca fascicularis KCNQ4 transcript. It will be appreciated that a genome editing system that targets human KCNQ4 may also target non-primate KCNQ4, e.g., rat or mouse KCNQ4, particularly if conserved regions of KCNQ4 transcript are targeted.

i. RNA-Guided Nucleases

[0381] RNA-guided nucleases according to the present disclosure include, but are not limited to, naturally-occurring Class 2 CRISPR nucleases such as Cas9, and Cpf1, as well as other nucleases derived or obtained therefrom. In functional terms, RNA-guided nucleases are defined as those nucleases that: (a) interact with (e.g., complex with) a gRNA; and (b) together with gRNA, associate with, and optionally cleave or modify, a target region of a DNA that includes (i) a sequence complementary to a targeting domain of a gRNA and, optionally, (ii) an additional sequence referred to as a “protospacer adjacent motif,” or “PAM,” which is described in greater detail herein.

[0382] Naturally occurring CRISPR systems are organized evolutionarily into two classes and five types (Makarova et al. Nat Rev Microbiol. 2011 June; 9(6): 467-477 (“Makarova”), which is incorporated in its entirety herein by reference), and while genome editing systems of the present disclosure may adapt components of any type or class of naturally occurring CRISPR system, embodiments presented herein are generally adapted from Class 2, and type II or V CRISPR systems. Class 2 systems, which encompass types II and V, are characterized by relatively large, multidomain CRISPR proteins (e.g., Cas9 or Cpf1) and one or more gRNAs (e.g., a crRNA and, optionally, a tracrRNA) that form ribonucleoprotein (RNP) complexes that associate with (i.e., target) and cleave specific loci complementary to a targeting (or spacer) sequence of a crRNA. Genome editing systems according to the present disclosure similarly target and edit cellular DNA sequences, but differ significantly from CRISPR systems occurring in nature. For example, unimolecular gRNAs described herein do not occur in nature, and both gRNAs and CRISPR nucleases according to this disclosure may incorporate any number of non-naturally occurring modifications.

[0383] As described herein, it should be noted that a genome editing systems of the present disclosure can be targeted to a single specific nucleotide sequence, or may be targeted to—and capable of editing in parallel—two or more specific nucleotide sequences through use of two or more gRNAs. In some embodiments, use of multiple gRNAs is referred to as “multiplexing.” As described herein, multiplexing can be employed, for example, to target multiple, unrelated target sequences of interest, or to form multiple SSBs or DSBs within a single target domain and, in some cases, to generate specific edits within such target domain. For example, International Patent Publication No. WO 2015/138510 by Maeder et al., which is incorporated in its entirety herein by reference; (“Maeder”) describes a genome editing system for correcting a point mutation (C.2991+1655A to G) in human CEP290 that results in t creation of a cryptic splice site, which in turn reduces or eliminates function of the gene. That genome editing system of Maeder utilizes two gRNAs targeted to sequences on either side of (i.e., flanking) the point mutation, and forms DSBs that flank the mutation. This, in turn, promotes deletion of the intervening sequence, including the mutation, thereby eliminating the cryptic splice site and restoring normal gene function.

[0384] As another example, WO 2016/073990 by Cotta-Ramusino, et al. (“Cotta-Ramusino”), which is incorporated in its entirety herein by reference. Cotta-Ramusino describes a genome editing system that utilizes two gRNAs in combination with a Cas9 nickase (a Cas9 that makes a single strand nick such as S. pyogenes D10A), an arrangement termed a “dual-nickase system.” The dual-nickase system of Cotta-Ramusino is configured to make two nicks on opposite strands of a sequence of interest that are offset by one or more nucleotides, which nicks combine to create a double strand break having an overhang (5′ in the case of Cotta-Ramusino, though 3′ overhangs are also possible). The overhang, in turn, can facilitate homology directed repair events in some circumstances. And, as another example, WO 2015/070083 by Palestrant et al., which is incorporated in its entirety herein by reference; (“Palestrant”) describes a gRNA targeted to a nucleotide sequence encoding Cas9 (referred to as a “governing RNA”), which can be included in a genome editing system comprising one or more additional gRNAs to permit transient expression of a Cas9 that might otherwise be constitutively expressed, for example in some virally transduced cells. These multiplexing applications are intended to be exemplary, rather than limiting, and the skilled artisan will appreciate that other applications of multiplexing are generally compatible with the genome editing systems described here.

[0385] Genome editing systems can, in some instances, form double strand breaks that are repaired by cellular DNA double-strand break mechanisms such as NHEJ or HDR. These mechanisms are described throughout the literature, for example by Davis & Maizels, PNAS, 111(10):E924-932, Mar. 11, 2014, which is incorporated in its entirety herein by reference (“Davis”) (describing Alt-HDR); Frit et al. DNA Repair 17(2014) 81-97, which is incorporated in its entirety herein by reference (“Frit”) (describing Alt-NHEJ); and Iyama and Wilson III, DNA Repair (Amst.) 2013-August; 12(8): 620-636, which is incorporated in its entirety herein by reference (“Iyama”) (describing canonical HDR and NHEJ pathways generally).

[0386] Where genome editing systems operate by forming DSBs, such systems optionally include one or more components that promote or facilitate a particular mode of double-strand break repair or a particular repair outcome. For instance, Cotta-Ramusino also describes genome editing systems in which a single stranded oligonucleotide “donor template” is added; a donor template is incorporated into a target region of cellular DNA that is cleaved by a genome editing system, and can result in a change in a target sequence.

[0387] In some embodiments, genome editing systems modify a target sequence, or modify expression of a gene in or near a target sequence, without causing single- or double-strand breaks. For example, a genome editing system may include a CRISPR protein fused to a functional domain that acts on DNA, thereby modifying a target sequence or its expression. As one example, a CRISPR protein can be connected to (e.g., fused to) a cytidine deaminase functional domain, and may operate by generating targeted C-to-A substitutions. Exemplary nuclease/deaminase fusions are described in Komor et al. Nature 533, 420-424 (19 May 2016) (“Komor”), which is incorporated in its entirety herein by reference. In some embodiments, a genome editing system may utilize a cleavage-inactivated (i.e., a “dead”) nuclease, such as a dead Cas9 (dCas9), and may operate by forming stable complexes on one or more targeted regions of cellular DNA, thereby interfering with functions involving a targeted region(s) including, without limitation, mRNA transcription, chromatin remodeling, etc. In some embodiments, a genome editing system may be self-inactivating to improve a safety profile, as described by Li et al. “A Self-Deleting AAV-CRISPR System for In vivo Editing” Mol Ther Methods Clin Dev. 2019 Mar. 15; 12: 111-122; published online (2018 Dec. 6), the contents of which are hereby incorporated by reference in its entirety.

[0388] As the following examples will illustrate, RNA-guided nucleases can be defined, in broad terms, by their PAM specificity and cleavage activity, even though variations may exist between individual RNA-guided nucleases that share the same PAM specificity or cleavage activity. Skilled artisans will appreciate that some aspects of the present disclosure relate to systems, methods and compositions that can be implemented using any suitable RNA-guided nuclease having a certain PAM specificity and/or cleavage activity. For this reason, unless otherwise specified, the term RNA-guided nuclease should be understood as a generic term, and not limited to any particular type (e.g., Cas9 vs. Cpf1), species (e.g., S. pyogenes vs. S. aureus, etc.) or variation (e.g., full-length vs. truncated or split; naturally-occurring PAM specificity vs. engineered PAM specificity, etc.) of RNA-guided nuclease. In some embodiments, a CRISPR/Cas is derived from a type II CRISPR/Cas system. In some embodiments, a CRISPR/Cas system is derived from a Cas9 protein. A Cas9 protein can be from Streptococcus pyogenes, Streptococcus thermophilus, Staphylococcus aureus, Campylobacter jejuni, or other species. In some embodiments, Cas9 can include: spCas9, Cpf1, CasY, CasX, saCas9, or CjCas9.

[0389] Administering bacterial Cas9 in humans presents immunogenicity concerns. Therefore, it is important to develop a codon-optimized CRISPR system as described herein to reduce immunogenicity. In addition, some other limitations include a need to use a two construct system (instead of a single construct system such that is used in shRNA and miRNA protocols), and determination of off-target risk (e.g., even if using dCas9 to reduce expression of KCNQ4, there may be repression of other targets besides from KCNQ4)

[0390] A PAM sequence takes its name from its sequential relationship to a “protospacer” sequence that is complementary to gRNA targeting domains (or “spacers”). Together with protospacer sequences, PAM sequences define target regions or sequences for specific RNA-guided nuclease/gRNA combinations.

[0391] Various RNA-guided nucleases may require different sequential relationships between PAMs and protospacers. In general, Cas9s recognize PAM sequences that are 3′ of a protospacer. Cpf1, on the other hand, generally recognizes PAM sequences that are 5′ of a protospacer.

[0392] In addition to recognizing specific sequential orientations of PAMs and protospacers, RNA-guided nucleases can also recognize specific PAM sequences. S. aureus Cas9, for instance, recognizes a PAM sequence of NNGRRT or NNGRRV, wherein the N residues are immediately 3′ of the region recognized by the gRNA targeting domain. S. pyogenes Cas9 recognizes NGG PAM sequences. And F. novicida Cpf1 recognizes a TTN PAM sequence. PAM sequences have been identified for a variety of RNA-guided nucleases, and a strategy for identifying novel PAM sequences has been described by Shmakov et al., 2015, Molecular Cell 60, 385-397, Nov. 5, 2015. It should also be noted that engineered RNA-guided nucleases can have PAM specificities that differ from\ PAM specificities of reference molecules (for instance, in the case of an engineered RNA-guided nuclease, a reference molecule may be a naturally occurring variant from which an RNA-guided nuclease is derived, or a naturally occurring variant having the greatest amino acid sequence homology to an engineered RNA-guided nuclease).

[0393] In addition to their PAM specificity, RNA-guided nucleases can be characterized by their DNA cleavage activity: naturally-occurring RNA-guided nucleases typically form DSBs in target nucleic acids, but engineered variants have been produced that generate only SSBs (discussed above) Ran & Hsu, et al., Cell 154(6), 1380-1389, Sep. 12, 2013 (“Ran”)), or that that do not cut at all.

[0394] CRISPR Fusion Proteins

As described herein, in some embodiments, a CRISPR nuclease is part of a fusion protein comprising one or more heterologous protein domains (e.g., about or more than about 1, 2, 3, 4, 5, 6, 7, 8, 9, 10, or more domains in addition to a CRISPR nuclease). A CRISPR nuclease fusion protein may comprise any additional protein sequence, and optionally a linker sequence between any two domains. Examples of protein domains that may be fused to a CRISPR nuclease include, without limitation, epitope tags, reporter gene sequences, and protein domains having one or more of the following activities: methylase activity, demethylase activity, transcription activation activity, transcription repression activity, transcription release factor activity, histone modification activity, RNA cleavage activity and nucleic acid binding activity. Additional domains that may form part of a fusion protein comprising a CRISPR nuclease are described in US20110059502, incorporated herein by reference. In some embodiments, a tagged CRISPR nuclease is used to identify a location of a target sequence. In some embodiments, a CRISPR nuclease that is part of a fusion protein has been engineered to produce only SSBs as described herein. In some embodiments, a CRISPR nuclease that is part of a fusion protein has been engineered to not cut at all as described herein.

[0395] CRISPR Variants

[0396] In general, RNA-guided nucleases comprise at least one RNA recognition and/or RNA binding domain. RNA recognition and/or RNA binding domains interact with a guiding RNA. CRISPR/Cas proteins can also comprise nuclease domains (i.e., DNase or RNase domains), DNA binding domains, helicase domains, RNAse domains, protein-protein interaction domains, dimerization domains, as well as other domains. RNA-guided nucleases can be modified to increase nucleic acid binding affinity and/or specificity, alter an enzymatic activity, and/or change another property of a protein. In some embodiments, a CRISPR/Cas-like protein of a fusion protein can be derived from a wild type Cas9 protein or fragment thereof. In other embodiments, a CRISPR/Cas can be derived from modified Cas9 protein. For example, an amino acid sequence of a Cas9 protein can be modified to alter one or more properties (e.g., nuclease activity, affinity, stability, and so forth) of a protein. Alternatively, domains of a Cas9 protein not involved in RNA-guided cleavage can be eliminated from a protein such that a modified Cas9 protein is smaller than a wild type Cas9 protein. In general, a Cas9 protein comprises at least two nuclease (i.e., DNase) domains. For example, a Cas9 protein can comprise a RuvC-like nuclease domain and a HNH-like nuclease domain. RuvC and HNH domains work together to cut single strands to make a double-stranded break in DNA (Jinek et al., 2012, Science, 337:816-821, which is incorporated in its entirety herein by reference).

[0397] In some embodiments, a Cas9-derived protein can be modified to contain only one functional nuclease domain (either a RuvC-like or a HNH-like nuclease domain). For example, a Cas9-derived protein can be modified such that one nuclease domain is deleted or mutated such that it is no longer functional (i.e., nuclease activity is absent). In some embodiments in which one nuclease domains is inactive, a Cas9-derived protein is able to introduce a nick into a double-stranded nucleic acid (such protein is termed a “nickase”), but not cleave double-stranded DNA. In any of the above-described embodiments, any or all of nuclease domains can be inactivated by one or more deletion mutations, insertion mutations, and/or substitution mutations using well-known methods, such as site-directed mutagenesis, PCR-mediated mutagenesis, and total gene synthesis, as well as other methods known in the art.

[0398] One example of a CRISPR/Cas9 system used to inhibit gene expression, CRISPRi, is described in U.S. Publication No. US2014/0068797, which is incorporated herein by reference in its entirety. CRISPRi induces permanent gene disruption that utilizes the RNA-guided Cas9 endonuclease to introduce DNA double stranded breaks which trigger error-prone repair pathways to result in frame shift mutations. A catalytically dead Cas9 lacks endonuclease activity. When coexpressed with a gRNA, a DNA recognition complex is generated that specifically interferes with transcriptional elongation, RNA polymerase binding, or transcription factor binding. This CRISPRi system efficiently represses expression of targeted genes.

ii. Guide RNAs (gRNAs)

[0399] gRNA Sequence Selection

[0400] A gRNA sequence may be specific for any gene, such as a gene that would affect (e.g., ameliorate, improve, attenuate, mitigate) hearing loss. In some embodiments, a gene encodes an ion channel subunit. In some such embodiments, a gene is KCNQ4. In some embodiments, a gRNA sequence includes an RNA sequence, a DNA sequence, a combination thereof (a RNA-DNA combination sequence), or a sequence with synthetic nucleotides. A gRNA sequence can be a single molecule or a double molecule. In one embodiment, a gRNA sequence comprises a single guide RNA (sgRNA).

[0401] In some embodiments, a gRNA sequence is specific for a gene and targets that gene for Cas endonuclease-induced double strand breaks. A sequence of a gRNA may be within a loci of the gene. In one embodiment, a gRNA sequence is at least 10, 11, 12, 13, 14, 15, 16, 17, 18, 19, 20, 21, 22, 23, 24, 25, 26, 27, 30, 31, 32, 33, 34, 35, 36, 37, 38, 39, 40 or more nucleotides in length. In some embodiments, a gRNA sequence is from about 18 to about 22 nucleotides in length.

[0402] As described herein, in some embodiments in the context of formation of a CRISPR complex, “target sequence” refers to a sequence to which a guide sequence is designed to have some complementarity, where hybridization between a target sequence and a guide sequence promotes formation of a CRISPR complex. Full complementarity is not necessarily required, provided there is sufficient complementarity to cause hybridization and promote formation of a CRISPR complex. A target sequence may comprise any polynucleotide, such as DNA or RNA polynucleotides. In some embodiments, a target sequence is located in the nucleus or cytoplasm of a cell. In other embodiments, a target sequence may be within an organelle of a eukaryotic cell, for example, mitochondrion or nucleus. Typically, in the context of an endogenous CRISPR system, formation of a CRISPR complex (comprising a guide sequence hybridized to a target sequence and complexed with one or more Cas proteins) results in cleavage of one or both strands in or near (e.g., within about 1, 2, 3, 4, 5, 6, 7, 8, 9, 10, 20, 50 or more base pairs) a target sequence. As with a target sequence, it is believed that complete complementarity is not needed, provided this is sufficient to be functional. In some embodiments, a tracr sequence has at least 50%, 60%, 70%, 80%, 90%, 95% or 99% of sequence complementarity along the length of a tracr mate sequence when optimally aligned.

[0403] In some embodiments, a gRNA sequence targets a KCNQ4 gene.

TABLE 2

| sequence | | 5′-gRNA Target |
|---|---|---|
| Number | Name | sequence-3′ |
| SEQ ID | guide RNA # 386Fw | AGGAGCACCAG |
| NO: 42 | | GAACTTGCCA |
| SEQ ID | guide RNA # | AAGCCGAAAAC |
| NO: 43 | 408Rev | CACGATCATC |
| SEQ ID | guide RNA # 233Fw | GCGCTACCGCC |
| NO: 44 | | GCCTGCAGAA |
| SEQ ID | guide RNA # 447Fw | TTTCGGCTTGG |
| NO: 45 | | AGTACATCGT |
| SEQ ID | guide RNA # 482Fw | CCGGATGCTGC |
| NO: 46 | | TGCCGCTACC |
| SEQ ID | guide RNA # 490Fw | TGCTGCCGCTA |
| NO: 47 | | CCGAGGATGG |

[0404] gRNA Design

[0405] Methods for selection and validation of target sequences as well as off-target analyses have been described previously, e.g., in Mali; Hsu; Fu et al., 2014 Nat biotechnol 32(3): 279-84, Heigwer et al., 2014 Nat methods 11(2):122-3; Bae et al. (2014) Bioinformatics 30(10): 1473-5; and Xiao A et al. (2014) Bioinformatics 30(8): 1180-1182, each of which is incorporated in its entirety herein by reference. As a non-limiting example, gRNA design may involve use of a software tool to optimize choice of potential target sequences corresponding to a user's target sequence, e.g., to minimize total off-target activity across a genome. While off-target activity is not limited to cleavage, cleavage efficiency at each off-target sequence can be predicted, e.g., using an experimentally-derived weighting scheme. These and other guide selection methods are described in detail in Maeder and Cotta-Ramusino.

[0406] For example, methods for selection and validation of target sequences as well as off-target analyses can be performed using cas-offinder (Bae S, Park J, Kim J-S. Cas-OFFinder: a fast and versatile algorithm that searches for potential off-target sites of Cas9 RNA-guided endonucleases. Bioinformatics. 2014; 30:1473-5, which is incorporated in its entirety herein by reference). Cas-offinder is a tool that can quickly identify all sequences in a genome that have up to a specified number of mismatches to a guide sequence.

[0407] As another example, methods for scoring how likely a given sequence is to be an off-target (e.g., once candidate target sequences are identified) can be performed. An exemplary score includes a Cutting Frequency Determination (CFD) score, as described by Doench J G, Fusi N, Sullender M, Hegde M, Vaimberg E W, Donovan K F, et al. Optimized sgRNA design to maximize activity and minimize off-target effects of CRISPR-Cas9. Nat Biotechnol. 2016; 34:184-91, which is incorporated in its entirety herein by reference.

[0408] gRNA Modifications

[0409] Activity, stability, or other characteristics of gRNAs can be altered through incorporation of certain modifications. As one example, transiently expressed or delivered nucleic acids can be prone to degradation by, e.g., cellular nucleases. Accordingly, gRNAs described herein can contain one or more modified nucleosides or nucleotides that can introduce stability toward nucleases. While not wishing to be bound by theory, it is also believed that certain modified gRNAs described herein can exhibit a reduced innate immune response when introduced into cells. Those of skill in the art will be aware of certain cellular responses commonly observed in cells, e.g., mammalian cells, in response to exogenous nucleic acids, particularly those of viral or bacterial origin. Such responses, which can include induction of cytokine expression and release and cell death, may be reduced or eliminated altogether by modifications presented herein.

[0410] Certain exemplary modifications discussed in this section can be included at any position within a gRNA sequence including, without limitation at or near its 5′ end (e.g., within 1-10, 1-5, or 1-2 nucleotides of a 5′ end) and/or at or near its 3′ end (e.g., within 1-10, 1-5, or 1-2 nucleotides of a 3′ end). In some cases, modifications are positioned within functional motifs, such as a repeat-anti-repeat duplex of a Cas9 gRNA, a stem loop structure of a Cas9 or Cpf1 gRNA, and/or a targeting domain of a gRNA. Others types of modified nucleobases are described herein.

f. KCNQ4 Knockdown

[0411] The present disclosure provides technologies (e.g., comprising compositions) that may, in some embodiments, reduce, suppress or otherwise decrease (“knock down”) expression of one or more gene products. For example, in some embodiments, technologies of the present disclosure may achieve knockdown of a KCNQ4 gene product (e.g., a KCNQ4 gene, mRNA, protein, etc.). In some embodiments, a KCNQ4 gene product may be a wild-type KCNQ4 or may have one or more mutations relative to a wild-type sequence, e.g., a loss-of-function KCNQ4 variant.

[0412] In some embodiments, knockdown of a KCNQ4 gene product (e.g., a KCNQ4 gene, mRNA, protein, etc.) is achieved using one or more techniques to inhibit one or more gene products or processes by which gene products are produced. For example, in some embodiments, the present disclosure provides technologies that comprise compositions that are or comprise inhibitory nucleic acid molecules to knock down expression of a gene product (e.g., a KCNQ4 gene product).

[0413] In some embodiments, an inhibitory nucleic acid molecule targets nucleotides within a KCNQ4 gene product.

[0414] In some embodiments, an inhibitory nucleic acid molecule comprises a nucleic acid strand that is complementary to a target site of a KCNQ4 gene product, e.g., KCNQ4 mRNA (e.g., complementary to a nucleotide sequence that is at least 85%, 90%, 91%, 92%, 93%, 94%, 95%, 96%, 97%, 98%, 99%, or 100% identical to a portion of SEQ ID NOs: 1-10 and/or 25-30 and/or 90-91). In some embodiments, a target site may be 15-30 nucleotides long, e.g., 15, 16, 17, 18, 19, 20, 21, 22, 23, 24, 25, 26, 27, 28, 29, or 30 nucleotides long, although shorter and longer target sites are also contemplated.

[0415] In some embodiments, an inhibitory nucleic acid molecule comprises a nucleic acid strand that comprises a region that is perfectly complementary to at least 6, 7, 8, 9, 10, 11, 12, 13 14, 15, 16, 17, 18, 19, 20, 21, 22, 23, 24, 25, 26, 27, 28, 29, or 30 consecutive nucleotides of any of SEQ ID NOs:1-10 or 25-30 or 90-91 or characteristic portions thereof).

[0416] In some embodiments an inhibitory nucleic acid molecule is capable of inhibiting expression of a KCNQ4 gene product of one or more non-human species, e.g., a non-human primate KCNQ4, e.g., Macaca fascicularis KCNQ4, in addition to human KCNQ4. A Macaca fascicularis KCNQ4 gene has been assigned NCBI Gene ID: 102143586 and predicted amino acid and nucleotide sequences of Macaca fascicularis KCNQ4 are listed under NCBI RefSeq accession numbers XP 005543852.2 and XM_005543795.2, respectively. In some embodiments, an inhibitory RNA molecule or Genome editing system is complementary to a target portion that is identical in human and Macaca fascicularis KCNQ4 transcripts. In some embodiments, an inhibitory RNA molecule is complementary to a target site of a human KCNQ4 transcript that differs by 1, 2, or 3 nucleotides from a sequence in a Macaca fascicularis KCNQ4 transcript. It will be appreciated that an inhibitory RNA molecule that inhibits expression of human KCNQ4 gene product may also inhibit expression of non-primate KCNQ4, e.g., rat or mouse KCNQ4, particularly if conserved regions of KCNQ4 transcript are targeted.

i. Inhibitory Nucleic Acid Molecules

[0417] RNA interference (RNAi) is a process of sequence-specific post-transcriptional gene silencing by which, e.g., double stranded RNA (dsRNA) homologous to a target locus can specifically inactivate gene function (Hammond et al., Nature Genet. 2001; 2:110-119; Sharp, Genes Dev. 1999; 13:139-141). For example, positional location of shRNAs targeting intronic-3XmiR, polyA-3XmiR, or both intronic-3XmiR and PolyA-3XmiR reduced PIZ serum level (% knockdown as compared to GFP control) (Mueller et al 2012). As described herein, positional impacts of miRNAs are tested and evaluated. In some embodiments, dsRNA-induced gene silencing can be mediated by short double-stranded small interfering RNAs (siRNAs) generated from longer dsRNAs by ribonuclease III cleavage (Bernstein et al., Nature 2001; 409:363-366 and Elbashir et al., Genes Dev. 2001; 15:188-200). Without being bound by any particular theory, RNAi-mediated gene silencing is thought to occur via sequence-specific RNA degradation, where sequence specificity is determined by interaction of a siRNA with its complementary sequence within a target RNA (see, e.g., Tuschl, Chem. Biochem. 2001; 2:239-245). In some embodiments, RNAi can involve use of, e.g., siRNAs (Elbashir, et al., Nature 2001; 411: 494-498, which is incorporated in its entirety herein by reference) or short hairpin RNAs (shRNAs) bearing a fold back stem-loop structure (Paddison et al., Genes Dev. 2002; 16: 948-958; Sui et al., Proc. Natl. Acad. Sci. USA 2002; 99:5515-5520; Brummelkamp et al., Science 2002; 296:550-553; Paul et al., Nature Biotechnol. 2002; 20:505-508, each of which is incorporated in its entirety herein by reference).

[0418] In some embodiments, an inhibitory nucleic acid molecule is designed on a patient-by-patient basis in accordance with the present disclosure. For example, in some embodiments, a patient with a history (e.g., parent or symptoms of hearing loss) of hearing loss or at risk of hearing loss may be evaluated (e.g., have samples diagnostically analyzed) for one or more variants (e.g., substitutions, additions, deletions, etc.) in one or more genes. In some such embodiments, identified variants (e.g., mutations) may be novel (i.e., not previously described in the literature), and inhibitory nucleic acid therapeutics will be personalized to variant(s) (e.g., mutation(s)) of a particular patient.

[0419] In some embodiments an inhibitory nucleic acid is one or more of a short interfering RNA (siRNA), a short hairpin RNA (shRNA), an antisense oligonucleotide, or a ribozyme. In some embodiments, knockdown of KCNQ4 expression is achieved via inhibitory nucleic acids that target a KCNQ4 sequence as described herein. In some such embodiments, a targeted KCNQ4 sequence may be a wild-type and/or pathogenic KCNQ4 variant gene product.

[0420] In some embodiments, an inhibitory nucleic acid of the present disclosure may be used to decrease expression of a KCNQ4 gene product (e.g., a loss-of-function KCNQ4 variant gene product). In some such embodiments, a construct encodes an inhibitory nucleic acid that may, in some embodiments, decrease expression of a KCNQ4 gene product, e.g., in a human cell (e.g., a hair cell, e.g., an outer hair cell). Non-limiting examples of siRNAs that can decrease expression of a KCNQ4 gene product, e.g., in a human cell (e.g., a hair cell, e.g., an outer hair cell) are provided herein In some embodiments, after an inhibitory nucleic acid is used to decrease expression of a loss-of-function KCNQ4 variant gene product, another (i.e., non-inhibitory) nucleic acid molecule may be used to express functional KCNQ4 protein. The present disclosure recognizes that, in some such embodiments, it is contemplated that wild-type or other functional (e.g., codon-optimized) KCNQ4 gene products may be vulnerable to miRNA degradation. Accordingly, in some such embodiments, a KCNQ4 sequence that is used to express a functional KCNQ4 gene product may be a codon-optimized KCNQ4 sequence.

[0421] siRNA or shRNA

[0422] In some embodiments, the present disclosure provides an inhibitory nucleic acid e, e.g., a chemically-modified siRNAs or a construct-driven expression of short hairpin RNA (shRNA) that are then cleaved to siRNA, e.g., within a cell. Accordingly, one of skill in the art will understand that, for purposes of sequences, an shRNA sequence is interchangeable with an siRNA sequence and that where the disclosure refers to an siRNA, an shRNA sequence may be used since the shRNA will be cleaved into siRNA. For example, in some embodiments, an inhibitory nucleic acid can be a dsRNA (e.g., siRNA) including 16-30 nucleotides, e.g., 16, 17, 18, 19, 20, 21, 22, 23, 24, 25, 26, 27, 28, 29, or 30 nucleotides in each strand, where one strand is substantially identical, e.g., at least 80% (or more, e.g., 85%, 90%, 95%, or 100%) identical, e.g., having 3, 2, 1, or 0 mismatched nucleotide(s), to a target region in a potassium-channel (e.g., Kv7.4) encoding mRNA, and the other strand is complementary to the first strand. In some embodiments, dsRNA molecules can be designed using methods known in the art, e.g., Dharmacon.com (see, siDESIGN CENTER) or “The siRNA User Guide,” available on the Internet at mpibpc.gwdg.de/abteilungen/100/105/sirna.html website which is incorporated in its entirety herein by reference. Without being bound by any particular theory, the present disclosure contemplates that siRNA or shRNAs are more “endogenous” (e.g., no foreign proteins) in a way that may be more recognizable to a cell compared to other available techniques that will be known to those of skill in the art. Accordingly, in some embodiments, siRNA or shRNA have lower immunogenicity and/or have less risk of off-target DNA cleavage as compared to other techniques known to those of skill in the art.

[0423] Several methods for expressing siRNA duplexes within cells from a construct to achieve long-term target gene suppression in cells are known in the art, e.g., including constructs that use a mammalian Pol III promoter system (e.g., H1 or U6/snRNA promoter systems (Tuschl, Nature Biotechnol., 20:440-448, 2002, which is incorporated in its entirety herein by reference) to express functional double-stranded siRNAs; (Bagella et al., J. Cell. Physiol., 177:206-213, 1998; Lee et al., Nature Biotechnol., 20:500-505, 2002; Paul et al., Nature Biotechnol., 20:505-508, 2002; Yu et al., Proc. Natl. Acad. Sci. U.S.A., 99(9):6047-6052, 2002; Sui et al., Proc. Natl. Acad. Sci. U.S.A. 99(6):5515-5520, 2002, each of which is incorporated in its entirety herein by reference). Transcriptional termination by RNA Pol III occurs at runs of four consecutive T residues in a DNA template, and can be used to provide a mechanism to end the siRNA transcript at a specific sequence. An siRNA is complementary to a sequence of a target gene in 5′-3′ and 3′-5′ orientations, and the two strands of a given siRNA can be expressed in the same construct or in separate constructs. Hairpin siRNAs, driven by H1 or U6 snRNA promoter and expressed in cells, can inhibit target gene expression (Bagella et al., 1998, supra; Lee et al., 2002, supra; Paul et al., 2002, supra; Yu et al., 2002, supra; Sui et al., 2002, supra).

[0424] In some embodiments, siRNAs of the present disclosure are double stranded nucleic acid duplexes (of, e.g., 15, 16, 17, 18, 19, 20, 21, 22, 23, 24, 25, 26, or 27 base pairs) comprising annealed complementary single stranded nucleic acid molecules. In some embodiments, siRNAs are short dsRNAs comprising annealed complementary single strand RNAs. In some embodiments, siRNAs comprise an annealed RNA:DNA duplex, wherein the sense strand of a duplex is a DNA molecule and the antisense strand of the same duplex is a RNA molecule.

[0425] In some embodiments, duplexed siRNAs comprise a 2 or 3 nucleotide 3′ overhang on each strand of a duplex. In some embodiments, siRNAs comprise 5′-phosphate and 3′-hydroxyl groups.

[0426] In some embodiments, a siRNA molecule of the present disclosure includes one or more natural nucleobase and/or one or more modified nucleobases derived from a natural nucleobase. Examples include, but are not limited to, uracil, thymine, adenine, cytosine, and guanine having their respective amino groups protected by acyl protecting groups, 2-fluorouracil, 2-fluorocytosine, 5-bromouracil, 5-iodouracil, 2,6-diaminopurine, azacytosine, pyrimidine analogs such as pseudoisocytosine and pseudouracil and other modified nucleobases such as 8-substituted purines, xanthine, or hypoxanthine (the latter two being natural degradation products). Exemplary modified nucleobases are disclosed in Chiu and Rana, R N A, 2003, 9, 1034-1048, Limbach et al. Nucleic Acids Research, 1994, 22, 2183-2196 and Revankar and Rao, Comprehensive Natural Products Chemistry, vol. 7, 313, each of which is incorporated in its entirety herein by reference.

[0427] Modified nucleobases also include expanded-size nucleobases in which one or more aryl rings, such as phenyl rings, have been added. Nucleic base replacements described in the Glen Research catalog (available on the world wide web at glenresearch.com); Krueger AT et al., Acc. Chem. Res., 2007, 40, 141-150; Kool, ET, Acc. Chem. Res., 2002, 35, 936-943; Benner S. A., et al., Nat. Rev. Genet., 2005, 6, 553-543; Romesberg, F. E., et al., Curr. Opin. Chem. Biol., 2003, 7, 723-733; Hirao, I., Curr. Opin. Chem. Biol., 2006, 10, 622-627, each of which is incorporated in its entirety herein by reference, are contemplated as useful for siRNA molecules described herein. In some embodiments, modified nucleobases also encompass structures that are not considered nucleobases but are other moieties such as, but not limited to, corrin- or porphyrin-derived rings. Porphyrin-derived base replacements have been described in Morales-Rojas, H and Kool, ET, Org. Lett., 2002, 4, 4377-4380, which is incorporated in its entirety herein by reference.

[0428] In some embodiments, modified nucleobases are of any one of the following structures, optionally substituted:

[chemical structure]

[0429] In some embodiments, a modified nucleobase is fluorescent. Exemplary such fluorescent modified nucleobases include phenanthrene, pyrene, stillbene, isoxanthine, isozanthopterin, terphenyl, terthiophene, benzoterthiophene, coumarin, lumazine, tethered stillbene, benzo-uracil, and naphtho-uracil, as shown below:

[chemical structure]

[0430] In some embodiments, a modified nucleobase is unsubstituted. In some embodiments, a modified nucleobase is substituted. In some embodiments, a modified nucleobase is substituted such that it contains, e.g., heteroatoms, alkyl groups, or linking moieties connected to fluorescent moieties, biotin or avidin moieties, or other protein or peptides. In some embodiments, a modified nucleobase is a “universal base” that is not a nucleobase in the most classical sense, but that functions similarly to a nucleobase. One representative example of such a universal base is 3-nitropyrrole.

[0431] In some embodiments, siRNA molecules described herein include nucleosides that incorporate modified nucleobases and/or nucleobases covalently bound to modified sugars. Some examples of nucleosides that incorporate modified nucleobases include 4-acetylcytidine; 5-(carboxyhydroxylmethyl)uridine; 2′-O-methylcytidine; 5-carboxymethylaminomethyl-2-thiouridine; 5-carboxymethylaminomethyluridine; dihydrouridine; 2′-O-methylpseudouridine; beta,D-galactosylqueosine; 2′-O-methylguanosine; N⁶-isopentenyladenosine; 1-methyladenosine; 1-methylpseudouridine; 1-methylguanosine; 1-methylinosine; 2,2-dimethylguanosine; 2-methyladenosine; 2-methylguanosine; N⁷-methylguanosine; 3-methyl-cytidine; 5-methylcytidine; 5-hydroxymethylcytidine; 5-formylcytosine; 5-carboxylcytosine; N⁶-methyladenosine; 7-methylguanosine; 5-methylaminoethyluridine; 5-methoxyaminomethyl-2-thiouridine; beta,D-mannosylqueosine; 5-methoxycarbonylmethyluridine; 5-methoxyuridine; 2-methylthio-N⁶-isopentenyladenosine; N-((9-beta,D-ribofuranosyl-2-methylthiopurine-6-yl)carbamoyl)threonine; N-((9-beta,D-ribofuranosylpurine-6-yl)-N-methylcarbamoyl)threonine; uridine-5-oxyacetic acid methylester; uridine-5-oxyacetic acid (v); pseudouridine; queosine; 2-thiocytidine; 5-methyl-2-thiouridine; 2-thiouridine; 4-thiouridine; 5-methyluridine; 2′-O-methyl-5-methyluridine; and 2′-O-methyluridine.

[0432] In some embodiments, nucleosides include 6′-modified bicyclic nucleoside analogs that have either (R) or (S)-chirality at the 6′-position and include the analogs described in U.S. Pat. No. 7,399,845, which is incorporated in its entirety herein by reference. In other embodiments, nucleosides include 5′-modified bicyclic nucleoside analogs that have either (R) or (S)-chirality at the 5′-position and include the analogs described in U.S. Publ. No. 20070287831, which is incorporated in its entirety herein by reference. In some embodiments, a nucleobase or modified nucleobase is 5-bromouracil, 5-iodouracil, or 2,6-diaminopurine. In some embodiments, a nucleobase or modified nucleobase is modified by substitution with a fluorescent moiety.

[0433] Methods of preparing modified nucleobases are described in, e.g., U.S. Pat. Nos. 3,687,808; 4,845,205; 5,130,30; 5,134,066; 5,175,273; 5,367,066; 5,432,272; 5,457,187; 5,457,191; 5,459,255; 5,484,908; 5,502,177; 5,525,711; 5,552,540; 5,587,469; 5,594,121, 5,596,091; 5,614,617; 5,681,941; 5,750,692; 6,015,886; 6,147,200; 6,166,197; 6,222,025; 6,235,887; 6,380,368; 6,528,640; 6,639,062; 6,617,438; 7,045,610; 7,427,672; and 7,495,088, each of which is incorporated in its entirety herein by reference.

[0434] In some embodiments, a siRNA molecule described herein includes one or more modified nucleotides wherein a phosphate group or linkage phosphorus in its nucleotides are linked to various positions of a sugar or modified sugar. As non-limiting examples, a phosphate group or linkage phosphorus can be linked to a 2′, 3′, 4′ or 5′ hydroxyl moiety of a sugar or modified sugar. Nucleotides that incorporate modified nucleobases as described herein are also contemplated in this context.

[0435] Other modified sugars can also be incorporated within a siRNA molecule. In some embodiments, a modified sugar contains one or more substituents at a 2′ position including one of the following: —F; —CF₃, —CN, —N₃, —NO, —NO₂, —OR′, —SR′, or —N(R′)₂, wherein each R′ is independently as defined above and described herein; —O—(C₁-C₁₀ alkyl), —S—(C₁-C₁₀ alkyl), —NH—(C₁-C₁₀ alkyl), or —N(C₁-C₁₀ alkyl)₂; —O—(C₂-C₁₀ alkenyl), —S—(C₂-C₁₀ alkenyl), —NH—(C₂-C₁₀ alkenyl), or —N(C₂-C₁₀ alkenyl)₂; —O—(C₂-C₁₀ alkynyl), —S—(C₂-C₁₀ alkynyl), —NH—(C₂-C₁₀ alkynyl), or —N(C₂-C₁₀ alkynyl)₂; or —O—(C₁-C₁₀ alkylene)—O—(C₁-C₁₀ alkyl), —O—(C₁-C₁₀ alkylene)—NH—(C₁-C₁₀ alkyl) or —O—(C₁-C₁₀ alkylene)—NH(C₁-C₁₀ alkyl)₂, —NH— alkylene)—O—(C₁-C₁₀ alkyl), or —N(C₁-C₁₀ alkylene)—O—(C₁-C₁₀ alkyl), wherein the alkyl, alkylene, alkenyl and alkynyl may be substituted or unsubstituted. Examples of substituents include, and are not limited to, —O(CH₂)ₙOCH₃, and —O(CH₂)ₙNH₂, wherein n is from 1 to about 10, MOE, DMAOE, DMAEOE. Also contemplated herein are modified sugars described in WO 2001/088198; and Martin et al., Helv. Chim. Acta, 1995, 78, 486-504, each of which is incorporated in its entirety herein by reference. In some embodiments, a modified sugar comprises one or more groups selected from a substituted silyl group, an RNA cleaving group, a reporter group, a fluorescent label, an intercalator, a group for improving pharmacokinetic properties of a nucleic acid, a group for improving pharmacodynamic properties of a nucleic acid, or other substituents having similar properties. In some embodiments, modifications are made at one or more of a 2′, 3′, 4′, 5′, or 6′ positions of a sugar or modified sugar, including a 3′ position of a sugar on a 3′-terminal nucleotide or in a 5′ position of a 5′-terminal nucleotide.

[0436] In some embodiments, a 2′-OH of a ribose is replaced with a substituent including one of the following: —H, —CF₃, —CN, —N₃, —NO, —NO₂, —OR′, —SR′, or —N(R′)₂, wherein each R′ is independently as defined above and described herein; —O—(C₁-C₁₀ alkyl), —S—(C₁-C₁₀ alkyl), —NH—(C₁-C₁₀ alkyl), or —N(C₁-C₁₀ alkyl)₂; —O—(C₂-C₁₀ alkenyl), —S—(C₂-C₁₀ alkenyl), —NH—(C₂-C₁₀ alkenyl), or —N(C₂-C₁₀ alkenyl)₂; —O—(C₂-C₁₀ alkynyl), —S—(C₂-C₁₀ alkynyl), —NH—(C₂-C₁₀ alkynyl), or —N(C₂-C₁₀ alkynyl)₂; or —O—(C₁-C₁₀ alkylene)—O—(C₁-C₁₀ alkyl), —O—(C₁-C₁₀ alkylene)—NH—(C₁-C₁₀ alkyl) or —O—(C₁-C₁₀ alkylene)—NH(C₁-C₁₀ alkyl)₂, —NH— alkylene)—O—(C₁-C₁₀ alkyl), or —N(C₁-C₁₀) alkyl)—(C₁-C₁₀ alkylene)—O—(C₁-C₁₀ alkyl), wherein an alkyl, alkylene, alkenyl and alkynyl may be substituted or unsubstituted. In some embodiments, a 2′-OH is replaced with —H (deoxyribose). In some embodiments, a 2′-OH is replaced with —F. In some embodiments, a 2′-OH is replaced with —OR′. In some embodiments, a 2′-OH is replaced with —OMe. In some embodiments, a 2′-OH is replaced with —OCH₂CH₂OMe.

[0437] Modified sugars also include locked nucleic acids (LNAs). In some embodiments, a locked nucleic acid has the structure indicated below. A locked nucleic acid of the structure below is indicated, wherein Ba represents a nucleobase or modified nucleobase as described herein, and wherein R^{2s} is —OCH₂C4′—

[chemical structure]

[0438] In some embodiments, a modified sugar is an ENA such as those described in, e.g., Seth et al., J Am Chem Soc. 2010 Oct. 27; 132(42): 14942-14950, which is incorporated in its entirety herein by reference. In some embodiments, a modified sugar is any of those found in an XNA (xenonucleic acid), for instance, arabinose, anhydrohexitol, threose, 2′fluoroarabinose, or cyclohexene.

[0439] Modified sugars include sugar mimetics such as cyclobutyl or cyclopentyl moieties in place of the pentofuranosyl sugar (see, e.g., U.S. Pat. Nos. 4,981,957; 5,118,800; 5,319,080; and 5,359,044, each of which is incorporated in its entirety herein by reference). Some modified sugars that are contemplated include sugars in which an oxygen atom within a ribose ring is replaced by nitrogen, sulfur, selenium, or carbon. In some embodiments, a modified sugar is a modified ribose wherein an oxygen atom within a ribose ring is replaced with nitrogen, and wherein a nitrogen is optionally substituted with an alkyl group (e.g., methyl, ethyl, isopropyl, etc.).

[0440] Non-limiting examples of modified sugars include glycerol, which form glycerol nucleic acid (GNA) analogues. An exemplary GNA analogue is described in Zhang, R et al., J. Am. Chem. Soc., 2008, 130, 5846-5847, which is incorporated in its entirety herein by reference; see also Zhang L, et al., J. Am. Chem. Soc., 2005, 127, 4174-4175 and Tsai CH et al., PNAS, 2007, 14598-14603, each which is incorporated in its entirety herein by reference. Another example of a GNA derived analogue, flexible nucleic acid (FNA) based on mixed acetal aminal of formyl glycerol, is described in each of Joyce GF et al., PNAS, 1987, 84, 4398-4402 and Heuberger BD and Switzer C, J. Am. Chem. Soc., 2008, 130, 412-413, each of which is incorporated in its entirety herein by reference. Additional non-limiting examples of modified sugars include hexopyranosyl (6′ to 4′), pentopyranosyl (4′ to 2′), pentopyranosyl (4′ to 3′), or tetrofuranosyl (3′ to 2′) sugars.

[0441] Modified sugars and sugar mimetics can be prepared by methods known in the art, including, but not limited to: A. Eschenmoser, Science (1999), 284:2118; M. Bohringer et al., Helv. Chim. Acta (1992), 75:1416-1477; M. Egli et al., J. Am. Chem. Soc. (2006), 128(33):10847-56; A. Eschenmoser in Chemical Synthesis: Gnosis to Prognosis, C. Chatgilialoglu and V. Sniekus, Ed., (Kluwer Academic, Netherlands, 1996), p. 293; K.-U. Schoning et al., Science (2000), 290:1347-1351; A. Eschenmoser et al., Helv. Chim. Acta (1992), 75:218; J. Hunziker et al., Helv. Chim. Acta (1993), 76:259; G. Otting et al., Helv. Chim. Acta (1993), 76:2701; K. Groebke et al., Helv. Chim. Acta (1998), 81:375; and A. Eschenmoser, Science (1999), 284:2118. Modifications to 2′ modifications can be found in Verma, S. et al. Annu. Rev. Biochem. 1998, 67, 99-134 and all references therein, each of which is incorporated in its entirety herein by reference. Specific modifications to a ribose can be found in the following references: 2′-fluoro (Kawasaki et. al., J. Med. Chem., 1993, 36, 831-841), 2′-MOE (Martin, P. Helv. Chim. Acta 1996, 79, 1930-1938), “LNA” (Wengel, J. Acc. Chem. Res. 1999, 32, 301-310); PCT Publication No. WO2012/030683, each of which is incorporated in its entirety herein by reference.

[0442] In some embodiments, a siRNA described herein can be introduced to a target cell as an annealed duplex siRNA. In some embodiments, a siRNA described herein is introduced to a target cell as single stranded sense and antisense nucleic acid sequences that, once within a target cell, anneal to form a siRNA duplex. Alternatively, sense and antisense strands of an siRNA can be encoded by an expression construct (such as an expression construct described herein) that is introduced to a target cell. Upon expression within a target cell, transcribed sense and antisense strands can anneal to reconstitute an siRNA.

[0443] In some embodiments, an siRNA molecule as described herein can be synthesized by standard methods known in the art, e.g., by use of an automated synthesizer. Without being bound by any particular theory, RNAs produced by such methodologies tend to be highly pure and to anneal efficiently to form siRNA duplexes. In some embodiments, following chemical synthesis, single stranded RNA molecules can be deprotected, annealed to form siRNAs, and purified (e.g., by gel electrophoresis or HPLC). Alternatively, in some embodiments, standard procedures can be used for in vitro transcription of RNA from DNA templates, e.g., carrying one or more RNA polymerase promoter sequences (e.g., T7 or SP6 RNA polymerase promoter sequences). Protocols for preparation of siRNAs using T7 RNA polymerase are known in the art (see, e.g., Donze and Picard, Nucleic Acids Res. 2002; 30:e46; and Yu et al., Proc. Natl. Acad. Sci. USA 2002; 99:6047-6052, each of which is incorporated in its entirety herein by reference). In some embodiments, sense and antisense transcripts can be synthesized in two independent reactions and annealed later. In some embodiments, sense and antisense transcripts can be synthesized simultaneously in a single reaction.

[0444] In some embodiments, an siRNA molecule can also be formed within a cell by transcription of RNA from an expression construct introduced into a cell (see, e.g., Yu et al., Proc. Natl. Acad. Sci. USA 2002; 99:6047-6052, which is incorporated in its entirety herein by reference). For example, in some embodiments, an expression construct for in vivo production of siRNA molecules can include one or more siRNA encoding sequences operably linked to elements necessary for proper transcription of an siRNA encoding sequence(s), including, e.g., promoter elements and transcription termination signals. In some embodiments, preferred promoters for use in such expression constructs may include, e.g., a polymerase-III promoter, e.g., a polymerase-III HI-RNA promoter (see, e.g., Brummelkamp et al., Science 2002; 296:550-553, which is incorporated in its entirety herein by reference), a U6 polymerase-III promoter (see, e.g., Sui et al., Proc. Natl. Acad. Sci. USA 2002; Paul et al., Nature Biotechnol. 2002; 20:505-508; and Yu et al., Proc. Natl. Acad. Sci. USA 2002; 99:6047-6052, each of which is incorporated in its entirety herein by reference). In some embodiments, an siRNA expression construct can comprise one or more construct sequences that facilitate cloning of an expression construct. Standard constructs that can be used include, e.g., pSilencer 2.0-U6 construct (Ambion Inc., Austin, Tex.).

[0445] . In some embodiments, an siRNA is or comprises nucleotides of any one of SEQ ID Nos: 48-55. In some embodiments, an siRNA comprises a mature guide strand having a nucleotide sequence that is at least 90%, 91%, 92%, 93%, 94%, 95%, 96%, 97%, 98%, 99%, or 100% identical to any one of SEQ ID NOs:48-55 (or a portion thereof). In some embodiments, a portion is 15, 16, 17, 18, 19, or 20 nucleotides long. In some embodiments, an siRNA comprises a mature guide strand having a nucleotide sequence that is 100% identical to nucleotides 2-8 of any one of SEQ ID NOs: 48-55

[0446] In some embodiments, the present disclosure provides shRNA sequences, which, when introduced into a cell will be cleaved to siRNAs. Accordingly, by way of non-limiting example, shRNA sequences of the present disclosure may be or comprise those provided in SEQ ID NOs 48-55 or elsewhere herein the disclosure.

[0447] Each of the following shRNA sequences is provided in 5′ to 3′ order:

(SEQ ID NO: 48)
TCCTCATCTTGGAATTCGTGATGCGAACATCACGAATTCCAAGATGA
GGA;
(SEQ ID NO: 49)
CGCCTTACTGGGCATCTCTTTCTCGAAAGAAAGAGATGCCCAGTAAG
GCG-;
(SEQ ID No: 50)
CTGGTACTACTATGACAGTATCGAAATACTGTCATAGTAGTACCAG;
(SEQ ID NO: 51)
AAGTAGCAGAGGAGAAGAGCTCGAAAGCTCTTCTCCTCTGCTACTT;
(SEQ ID NO: 52)
AAGACAGTCATCCGCTCCATCCGAAGATGGAGCGGATGACTGTCTT;
(SEQ ID NO: 53)
AAGGACGTCATTGAGCAGTACCGAAGTACTGCTCAATGACGTCCTT;
(SEQ ID NO: 54)
GCCGGATCAAGAGCCTGCAAACGAATTTGCAGGCTCTTGATCCGGC;
(SEQ ID NO: 55)
GGTGGATGAAATCAGCATGATCGAAATCATGCTGATTTCATCCACC;

[0448] miRNA

[0449] The present disclosure provides technologies related to or comprising one or more inhibitory nucleic acid molecules such as, e.g., one or more nucleotide sequences that are, comprise, or encode, microRNAs. MicroRNAs (miRNAs) are a highly conserved class of small RNA molecules that are transcribed from DNA in genomes of plants and animals, but are not translated into protein. As is known to those in the art, animal cells express a range of noncoding RNAs of approximately 22 nucleotides termed micro RNA (miRNAs) and can regulate gene expression at a post transcriptional or translational level during animal development. miRNAs are excised from an approximately 70 nucleotide precursor RNA stem-loop. By substituting stem sequences of an miRNA precursor with miRNA sequence complementary to a target mRNA, a construct that expresses a novel miRNA can be used to produce siRNAs to initiate RNAi against specific mRNA targets in mammalian cells (Zeng, Mol. Cell, 9:1327-1333, 2002). In some embodiments, when expressed by DNA constructs containing polymerase III promoters, micro-RNA designed hairpins can silence gene expression (McManus, RNA 8:842-850, 2002).

[0450] In some embodiments, miRNAs can be synthesized and locally or systemically administered to a subject, e.g., for therapeutic purposes. In some embodiments, miRNAs can be designed and/or synthesized as mature molecules or precursors (e.g., pri- or pre-miRNAs). In some embodiments, a pre-miRNA includes a guide strand and a passenger strand that are the same length (e.g., about 15, 16, 17, 18, 19, 20, 21, 22, 23, 24, or 25 nucleotides). In some embodiments, a pre-miRNA includes a guide strand and a passenger strand that are different lengths (e.g., one strand is about 19 nucleotides, and the other is about 21 nucleotides). In some embodiments, an miRNA can target a coding region, a 5′ untranslated region, and/or a 3′ untranslated region, of endogenous mRNA. In some embodiments, an miRNA comprises a guide strand comprising a nucleotide sequence having sufficient sequence complementary with an endogenous mRNA of a subject to hybridize with and inhibit expression of endogenous mRNA.

[0451] In some embodiments, miRNAs has advantages compared to shRNAs for inhibiting nucleic acids. For example, shRNA requires a high level of expression, can clog Argonaut machinery, is not endogenous, and relies on two promoters. By contrast, in some embodiments, it is contemplated that miRNA is more “endogenous” than shRNA, and therefore, is expressed at similar levels as KCNQ4 driven by a single promoter. That is, miRNAs can be synthetic or naturally occurring and naturally-occurring miRNAs are present in cells across vertebrate and invertebrate species. In contrast, to date, shRNAs have not been detected as a naturally occurring component of a cell. In some embodiments, miRNAs have low or no passenger strand generation, can be used therapeutically, and/or are expressed in neurons and hair cells.

[0452] The present disclosure describes that, in some embodiments, minor changes (e.g., one or more substitutions) were made to the passenger strand of a given mRNA. In some such embodiments, such change(s) (e.g., substitution(s)) were made in order to ensure that the synthetic KCNQ4 miRNA would have the same secondary structure as an endogenous miRNA gene. For example, in some constructs, the G at position 73 of the KCNQ miR1 hsa-3miR-335 construct can be substituted for a C to generate a bulge (e.g., Pyr:Pur (G:U) can be substituted for Pyr:Pyr (C:U) base pairing). One or more such base changes (e.g., substitution) can, in some embodiments, result in a secondary structure (e.g., bulge position) in the synthetic miRNA such that the secondary structure is similar or identical to that of an endogenous miRNA gene. One of ordinary skill in the art will appreciate that the exact location (e.g., base or bases) where one or more changes (e.g., substitutions) is made will vary with the exact sequence of a synthetic miRNA, and one of such skill will understand how to modify bases relative to the sequence of a synthesized construct as compared to its endogenous counterpart.

[0453] The present disclosure also recognizes the surprising finding that, in some embodiments, an miRNA of the same sequence of an shRNA provides an unexpected increase in efficiency. For example, in some embodiments, if an shRNA and miRNA are designed for a given target, the present disclosure provides the surprising finding that an miRNA is much more efficient (as measured by KD) as compared to an shRNA of the same sequence. In some embodiments, an miRNA comprises a mature guide strand having a nucleotide sequence that is at least 90%, 91%, 92%, 93%, 94%, 95%, 96%, 97%, 98%, 99%, or 100% identical to any one of SEQ ID NOs:56-70(or a portion thereof). In some embodiments, a portion is 15, 16, 17, 18, 19, or 20 nucleotides long. In some embodiments, an miRNA comprises a mature guide strand having a nucleotide sequence that is 100% identical to nucleotides 2-8 of any one of SEQ ID NOs: 56-70.

[0454] Each of the following miR sequences is provided in 5′ to 3′ order:

miR1-155
(SEQ ID NO: 56)
TTGAGAATCCTGATGGAGCGG
miR2-155
(SEQ ID NO: 57)
TTGAGTCTCAGAGATGCCC
miR4-155
(SEQ ID NO: 58)
TTCTCGAAGTGCTTCTGCCGG
miR5-155
(SEQ ID NO: 59)
TTCTCCACCTTGACCACGCGT
miR6-155
(SEQ ID NO: 60)
ATACTGTCATAGTAGTAGCAG
miR7-155
(SEQ ID NO: 61)
TAGTCGGAGGTGATGTCGGGG
miR1-16
(SEQ ID NO: 62)
TTGAGAATCCTGATGGAGCGG
miR1-26
(SEQ ID NO: 63)
TTGAGAATCCTGATGGAGCGG
miR1-96
(SEQ ID NO: 64)
TTGAGAATCCTGATGGAGCGG
miR1-122
(SEQ ID NO: 65)
TTGAGAATCCTGATGGAGCGG
miR1-135
(SEQ ID NO: 66)
TTGAGAATCCTGATGGAGCGG
miR1-182
(SEQ ID NO: 67)
TTGAGAATCCTGATGGAGCGG
miR1-183
(SEQ ID NO: 68)
TTGAGAATCCTGATGGAGCGG
miR1-335
(SEQ ID NO: 69)
TTGAGAATCCTGATGGAGCGG
miR1-451
(SEQ ID NO: 70)
TTGAGAATCCTGATGGAGCGG
mouse miR2-26
(SEQ ID NO: 96)
TTGAGTCTTAGAGAGGCCCGG
mouse miR6-26
(SEQ ID NO: 97)
ATGCTGTCATAGTAATACCAG

[0455] In some embodiments, the present disclosure provides methods for choosing miRNAs targeting sequences expressed within a variety of compartments within an ear. For example, spiral ganglion: miR-96, -182, -183, -15a, -30b, -99a, -18a, -124a, -194; spiral limbus: miR-96, -182, -193, -205; Reissner's membrane: miR-205; marginal cells: miR-376a, -376b; spiral ligament: miR-205; supporting cells: miR-15a, -30b, -99a; hair cells: miR-96, -182, -183, -15a, -30b, -99a, -18a, -140, 194; basilar membrane: miR-205, -15a, -30b, -99a; inner sulcus: miR-96, -182, -183). Ushakov et al., 2013. As described herein, miRNA scaffolds miR-16, miR-26, miR-96 (hair cells), miR-122, miR-135, miR-155, miR-182 (hair cells), miR-183 (hair cells), miR-335, and miR-451 were considered for initial testing of impact on KCNQ4 expression. In some embodiments, an miRNA may comprise or consist of miR1-155; miR2-155; miR4-155; miR5-155; miR6-155; miR7-155; miR1-16; miR1-26; miR1-96; miR1-122; miR1-135; miR1-182; miR1-183; miR1-335; miR1-451. In some embodiments, a construct of the present disclosure may comprise one or more miRNAs selected from miR1-155; miR2-155; miR4-155; miR5-155; miR6-155; miR7-166 miR1-16; miR1-26; miR1-96; miR1-122; miR1-135; miR1-182; miR1-183; miR1-335; miR1-451 and combinations thereof.

[0456] Antisense Nucleic Acid

[0457] In some embodiments, an inhibitory nucleic acid molecule may be or comprise an antisense nucleic acid molecule, e.g., nucleic acid molecules whose nucleotide sequence is complementary to all or part of an mRNA encoding a potassium channel (e.g., KCNQ4) protein. In some embodiments, an antisense nucleic acid molecule can be antisense to all or part of a non-coding region of a coding strand of a nucleotide sequence encoding a potassium channel (e.g., KCNQ4) protein. In some embodiments, a non-coding regions (“5′ and 3′ untranslated regions”) are 5′ and 3′ sequences that flank a coding region and are not translated into amino acids. Based upon sequences disclosed herein, one of skill in the art can easily choose and synthesize any of a number of appropriate antisense molecules to target a potassium channel (e.g., KCNQ4) gene described herein. For example, a “gene walk” comprising a series of oligonucleotides of 15-30 nucleotides spanning a length of a nucleic acid (e.g., a potassium channel (e.g., KCNQ4) mRNA) can be prepared, followed by testing for inhibition of expression of to gene. Optionally, gaps of 5-10 nucleotides can be left between oligonucleotides to reduce numbers of oligonucleotides synthesized and tested.

[0458] In some embodiments, an antisense oligonucleotide can be, for example, about 5, 10, 15, 20, 25, 30, 35, 40, 45, or 50 nucleotides or more in length. One of skill in the art will recognize that an antisense oligonucleotide can be synthesized using various different chemistries.

[0459] Ribozymes

[0460] In some embodiments, an inhibitory nucleic acid molecule may be or comprise a ribozyme. As is known to those of skill in the art, ribozymes are catalytic RNA molecules with ribonuclease activity. In some embodiments, a ribozyme may be used as a controllable promoter. In some embodiments, ribozymes are capable of cleaving a single-stranded nucleic acid, such as an mRNA, to which they have a complementary region. Thus, in some embodiments, ribozymes (e.g., hammerhead ribozymes (described in Haselhoff and Gerlach, Nature, 334:585-591, 1988, which is incorporated in its entirety herein by reference)) can be used to catalytically cleave mRNA transcripts to thereby inhibit translation of a protein encoded by a given mRNA. Methods of designing and producing ribozymes are known in the art (see, e.g., Scanlon, 1999, Therapeutic Applications of Ribozymes, Humana Press, which is incorporated in its entirety herein by reference). In some embodiments, for example, a ribozyme having specificity for a KCNQ4 gene product mRNA can be designed based upon nucleotide sequence of a KCNQ4 gene product cDNA (e.g., any exemplary cDNA sequences described herein). For example, a derivative of a Tetrahymena L-19 IVS RNA can be constructed in which nucleotide sequence of an active site is complementary to a nucleotide sequence to be cleaved in a KCNQ4 gene product mRNA (Cech et al. U.S. Pat. No. 4,987,071; and Cech et al., U.S. Pat. No. 5,116,742, each of which is incorporated in its entirety herein by reference). Alternatively, an mRNA encoding a KCNQ4 gene product protein can be used to select a catalytic RNA having a specific ribonuclease activity from a pool of RNA molecules (See, e.g., Bartel and Szostak, Science, 261:1411-1418, 1993, which is incorporated in its entirety herein by reference).

g. Pharmaceutical Compositions and Kits

[0461] Pharmaceutical compositions of the present disclosure may include constructs, as described herein. For example, in some embodiments, pharmaceutical compositions may comprise AAV constructs and/or AAV particles. In some such embodiments, such AAV particles comprise one or more constructs, which comprise a nucleic acid, e.g., one or a plurality of AAV constructs. For example, a pharmaceutical composition of the present disclosure comprise as described herein, in combination with one or more pharmaceutically or physiologically acceptable carriers, diluents or excipients. Such compositions may comprise buffers such as neutral buffered saline, phosphate buffered saline and the like; carbohydrates such as glucose, mannose, sucrose, or dextrans; mannitol; proteins; polypeptides or amino acids such as glycine; antioxidants; chelating agents such as EDTA or glutathione; adjuvants (e.g., aluminum hydroxide); and preservatives. In some embodiments, compositions of the present disclosure are formulated for intravenous administration. In some embodiments compositions of the present disclosure are formulated for intra-cochlear administration.

[0462] In some embodiments, therapeutic compositions of the present disclosure are formulated for intra-cochlear administration. In some embodiments, a therapeutic composition is formulated to comprise a lipid nanoparticle, a polymeric nanoparticle, a mini-circle DNA or a CELiD DNA.

[0463] In some embodiments, a therapeutic composition is formulated to comprise a synthetic perilymph solution. For example, in some embodiments, a synthetic perilymph solution includes 20-200 mM NaCl; 1-5 mM KCl; 0.1-10 mM CaCl₂; 1-10 mM glucose; and 2-50 mM HEPES, with a pH between about 6 and about 9. In some embodiments, any of the pharmaceutical compositions described herein may further comprise one or more agents that promote entry of a nucleic acid or any of the constructs described herein into a mammalian cell (e.g., a liposome or cationic lipid). In some embodiments, any constructs described herein can be formulated using natural and/or synthetic polymers. Non-limiting examples of polymers that may be included in any compositions described herein can include, but are not limited to, DYNAMIC POLYCONJUGATE® (Arrowhead Research Corp., Pasadena, Calif.), formulations from Minis Bio (Madison, Wis.) and Roche Madison (Madison, Wis.), PhaseRX polymer formulations such as, without limitation, SMARTT POLYMER TECHNOLOGY® (PhaseRX, Seattle, Wash.), DMRI/DOPE, poloxamer, VAXFECTIN® adjuvant from Vical (San Diego, Calif.), chitosan, cyclodextrin from Calando Pharmaceuticals (Pasadena, Calif.), dendrimers and poly (lactic-co-glycolic acid) (PLGA) polymers, RONDEL™ (RNAi/Oligonucleotide Nanoparticle Delivery) polymers (Arrowhead Research Corporation, Pasadena, Calif.), and pH responsive co-block polymers, such as, but not limited to, those produced by PhaseRX (Seattle, Wash.). Many of these polymers have demonstrated efficacy in delivering oligonucleotides in vivo into a mammalian cell (see, e.g., deFougerolles, Human Gene Ther. 19:125-132, 2008; Rozema et al., Proc. Natl. Acad. Sci. U.S.A. 104:12982-12887, 2007; Rozema et al., Proc. Natl. Acad. Sci. U.S.A. 104:12982-12887, 2007; Hu-Lieskovan et al., Cancer Res. 65:8984-8982, 2005; Heidel et al., Proc. Natl. Acad. Sci. U.S.A. 104:5715-5721, 2007, each of which is incorporated in its entirety herein by reference). Any compositions described herein can be, e.g., a pharmaceutical composition.

[0464] In some embodiments, a composition includes a pharmaceutically acceptable carrier (e.g., phosphate buffered saline, saline, or bacteriostatic water). Upon formulation, solutions can be administered in a manner compatible with a dosage formulation and in such amount as is therapeutically effective. Formulations are easily administered in a variety of dosage forms such as injectable solutions, injectable gels, drug-release capsules, and the like.

[0465] Compositions provided herein can be, e.g., formulated to be compatible with their intended route of administration. A non-limiting example of an intended route of administration is local administration (e.g., intra-cochlear administration).

[0466] Also provided are kits including any compositions described herein. In some embodiments, a kit can include a solid composition (e.g., a lyophilized composition including at least one construct as described herein) and a liquid for solubilizing a lyophilized composition.

[0467] In some embodiments, a kit can include a pre-loaded syringe including any compositions described herein.

[0468] In some embodiments, a kit includes a vial comprising any of the compositions described herein (e.g., formulated as an aqueous composition, e.g., an aqueous pharmaceutical composition).

[0469] In some embodiments, a kit can include instructions for performing any methods described herein.

h. Cells

[0470] In some embodiments, the present disclosure provides a cell (e.g., a mammalian cell, e.g., a human cell, e.g., an ear hair cell, e.g., an OHC, an IHC, etc.) that comprises any nucleic acids, constructs (e.g., at least two different constructs described herein), compositions, etc., as described herein. As will be appreciated by one of skill in the art, nucleic acids and constructs described herein can be introduced into any cell (e.g., a mammalian cell, e.g., a human cell, e.g., an ear hair cell, e.g., an OHC, an IHC, etc.). Non-limiting examples of certain constructs and methods for introducing constructs into cells are described herein.

[0471] In some embodiments, a cell is a human cell, a mouse cell, a porcine cell, a rabbit cell, a dog cell, a rat cell, a sheep cell, a cat cell, a horse cell, a non-human primate cell, or an insect cell. In some embodiments, a cell is a specialized cell of the cochlea. In some embodiments, a cell is a cochlear inner hair cell or a cochlear outer hair cell. In some embodiments, a cell is a cochlear inner hair cell. In some embodiments, a cell is a cochlear outer hair cell.

[0472] In some embodiments, a cell is in vitro. In some embodiments, a cell is in vivo or ex vivo. For example, in some embodiments, cell is present in a mammal. In some embodiments, a cell (e.g., a mammalian cell) is autologous cell obtained, e.g., from a subject (e.g., a mammal) and cultured ex vivo.

[0473] In some embodiments, cells provided by the present disclosure are transfected host cells. In some embodiments, transfection is used to refer to uptake of foreign DNA by a cell, and a cell has been “transfected” when exogenous DNA has been introduced inside a cell membrane. A number of transfection techniques are generally known in the art (see, e.g., Graham et al. (1973) Virology, 52:456; Sambrook et al. (1989) Molecular Cloning, a laboratory manual, Cold Spring Harbor Laboratories, New York, Davis et al. (1986) Basic Methods in Molecular Biology, Elsevier; and Chu et al. (1981) Gene 13:197, each of which is incorporated in its entirety herein by reference). Such techniques can be used to introduce one or more exogenous nucleic acids, such as a nucleotide integration construct and other nucleic acid molecules, into suitable host cells.

[0474] In some embodiments, a host cell is a mammalian cell. A host cell may be used as a recipient of an AAV helper construct, an AAV minigene plasmid, an accessory function construct, and/or other transfer DNA associated with production of recombinant AAVs. The term includes progeny of an original cell that has been transfected. In some embodiments, a host cell is a cell that has been transfected with an exogenous DNA sequence. It is understood that progeny of a single parental cell may not necessarily be completely identical in morphology or in genomic or total DNA complement as the original parent, due to natural, accidental, or deliberate mutation.

### 4. Methods

[0475] Among other things, the present disclosure provides methods. In some embodiments, a method comprises introducing a composition as described herein into the inner ear (e.g., a cochlea) of a subject. For example, provided herein are methods that in some embodiments include administering to an inner ear (e.g., cochlea) of a subject (e.g., an animal, e.g., a mammal, e.g., a primate, e.g., a human) a therapeutically effective amount of any composition described herein.

[0476] In some embodiments, the present disclosure provides methods of generating and/or testing one or more compositions of components thereof. In some such embodiments, compositions may be used to treat a subject with hearing loss. In some embodiments, the present disclosure provides methods of genetically modifying one or more cells. In some embodiments, methods of the present disclosure, including compositions produced or administered using such methods include those in WO 2019/028246 A2, PCT/US2019/060324, and PCT/US2019/060328, each of which is incorporated by reference herein, in its entirety.

[0477] For example, in some embodiments, in addition to the exemplary compositions described herein, FIG. 6 depicts exemplary miRNA constructs that can be used in accordance with the present disclosure. These sequences and constructs can be tested (e.g., via double transfection) in cells (e.g., human cells, e.g., HEK cells, e.g., hair cells, e.g., outer hair cells), in single, and/or in multiplexed format. mRNA and protein levels are or can be measured using appropriate qualitative or quantitative techniques such as PCR, immunofluorescence (of cells) and western blot techniques. As described herein, exemplary miRNA constructs can be delivered as plasmids (or constructs), or via AAV compositions described herein.

a. Methods of Making

[0478] In some embodiments, viral constructs are prepared by any methods known to one of skill in the art. For example, in some embodiments, viral constructs are prepared using a standard triple transfection system (e.g., three plasmids/constructs, comprising (i) rep/cap genes, (ii) helper genes, and (iii) payloads (e.g., miRNA, KCNQ4, etc.) respectively, e.g., four plasmids/constructs, etc.) followed by standard isolation and purification methods (e.g., CsCl gradient). In some such embodiments, such viral preparations are formulated for delivery into a subject.

[0479] The present disclosure provides, among other things, method of making AAV-based constructs. In some embodiments, such methods include use of host cells. In some embodiments, a host cell is a mammalian cell. A host cell may be used as a recipient of an AAV helper construct, an AAV minigene plasmid, an accessory function construct, and/or other transfer DNA associated with production of recombinant AAVs. The term includes progeny of an original cell that has been transfected. Thus, a “host cell” as used herein may refer to a cell that has been transfected with an exogenous DNA sequence. It is understood that progeny of a single parental cell may not necessarily be completely identical in morphology or in genomic or total DNA complement as the original parent, due to natural, accidental, or deliberate mutation.

[0480] Additional methods for generating and isolating AAV viral constructs suitable for delivery to a subject are described in, e.g., U.S. Pat. Nos. 7,790,449; 7,282,199; WO 2003/042397; WO 2005/033321, WO 2006/110689; and U.S. Pat. No. 7,588,772, each of which is incorporated in its entirety herein by reference. In one system, a producer cell line is transiently transfected with a construct that encodes a transgene flanked by ITRs and a construct(s) that encodes rep and cap. In another system, a packaging cell line that stably supplies rep and cap is transiently transfected with a construct encoding a transgene flanked by ITRs. In each of these systems, AAV virions are produced in response to infection with helper adenovirus or herpesvirus, and AAVs are separated from contaminating virus. Other systems do not require infection with helper virus to recover AAV—helper functions (i.e., adenovirus E1, E2a, VA, and E4 or herpesvirus UL5, UL8, UL52, and UL29, and herpesvirus polymerase) are also supplied, in trans, by a given system. In such systems, helper functions can be supplied by transient transfection of cells with constructs that encode helper functions, or cells can be engineered to stably contain genes encoding helper functions, expression of which can be controlled at a transcriptional and/or posttranscriptional level.

[0481] In yet another embodiment, the present disclosure provides a system in which transgene flanked by ITRs and rep/cap genes are introduced into insect host cells by infection with insect virus(e.g., baculovirus)-based constructs. Such production systems are known in the art (see generally, e.g., Zhang et al., 2009, Human Gene Therapy 20:922-929). Methods of making and using these and other AAV production systems are also described in U.S. Pat. Nos. 5,139,941; 5,741,683; 6,057,152; 6,204,059; 6,268,213; 6,491,907; 6,660,514; 6,951,753; 7,094,604; 7,172,893; 7,201,898; 7,229,823; and 7,439,065, each of which is incorporated in its entirety herein by reference.

b. Methods of Treatment

[0482] In some embodiments, technologies of the present disclosure are used to treat subjects with or at risk of hearing loss. For example, in some embodiments, a subject has an autosomal dominant hearing loss attributed to at least one variant of a KCNQ4 gene. It will be understood by those in the art that many different changes (e.g., substitutions, deletions, additions, etc.) in a KCNQ4 gene that can result in or risk causing hearing loss. In some such embodiments, one or more changes in a KCNQ4 sequence results in a loss-of-function KCNQ4 gene variant.

[0483] In some embodiments, a subject experience hearing loss can be evaluated to determine if and where one or more mutations may exists that may cause hearing loss. In some such embodiments, status of a KCNQ4 gene product (e.g., polynucleotide, e.g., polypeptide) or function can be evaluated (e.g., via protein or sequencing analyses). In some embodiments of any methods described herein, a subject may be a mammal. In some embodiments, a mammal is a rodent, a non-human primate, or a human. In some embodiments of any methods described herein, a subject is an adult, a teenager, a juvenile, a child, a toddler, an infant, newborn, or fetus. In some embodiments of any methods described herein, a subject is 1-5, 1-10, 1-20, 1-30, 1-40, 1-50, 1-60, 1-70, 1-80, 1-90, 1-100, 1-110, 2-5, 2-10, 10-20, 20-30, 30-40, 40-50, 50-60, 60-70, 70-80, 80-90, 90-100, 100-110, 10-30, 10-40, 10-50, 10-60, 10-70, 10-80, 10-90, 10-100, 10-110, 20-40, 20-50, 20-60, 20-70, 20-80, 20-90, 20-100, 20-110, 30-50, 30-60, 30-70, 30-80, 30-90, 30-100, 40-60, 40-70, 40-80, 40-90, 40-100, 50-70, 50-80, 50-90, 50-100, 60-80, 60-90, 60-100, 70-90, 70-100, 70-110, 80-100, 80-110, or 90-110 years of age. In some embodiments a subject is 1, 2, 3, 4, 5, 6, 7, 8, 9, 10, or 11 months of age. In some embodiments, a subject is 1, 2, 3, 4, 5 or more weeks of age. In some embodiments, a subject is between 23 and 42 gestational weeks of age (i.e., a fetus of a gestational age).

[0484] In some embodiments of any methods described herein, such methods may result in improvement in hearing (e.g., any metrics for determining improvement in hearing described herein) in a subject in need thereof for at least 10 days, at least 15 days, at least 20 days, at least 25 days, at least 30 days, at least 35 days, at least 40 days, at least 45 days, at least 50 days, at least 55 days, at least 60 days, at least 65 days, at least 70 days, at least 75 days, at least 80 days, at least 85 days, at least 100 days, at least 105 days, at least 110 days, at least 115 days, at least 120 days, at least 5 months, at least 6 months, at least 7 months, at least 8 months, at least 9 months, at least 10 months, at least 11 months, or at least 12 months.

[0485] In some embodiments a subject (e.g., a mammal, e.g., a human) has or is at risk of developing non-syndromic sensorineural hearing loss. In some embodiments a subject (e.g., a mammal, e.g., a human) has been previously identified as having a mutation in a KCNQ4 gene. In some embodiments a subject (e.g., a mammal, e.g., a human) has any mutations in a KCNQ4 gene that are described herein or are known in the art to be associated with non-symptomatic sensorineural hearing loss.

[0486] In some embodiments a subject (e.g., a mammal, e.g., a human) has been identified as being a carrier of a mutation in a KCNQ4 gene (e.g., via genetic testing). In some embodiments a subject (e.g., a mammal, e.g., a human) has been identified as having a mutation in a KCNQ4 gene and has been diagnosed with non-symptomatic sensorineural hearing loss. In some embodiments a subject (e.g., a mammal, e.g., a human) has been identified as having non-symptomatic sensorineural hearing loss.

[0487] In some embodiments, a subject (e.g., a mammal, e.g., a human) has been identified as being at risk of hearing loss (e.g., at risk of being a carrier of a gene mutation, e.g., a KCNQ4 gene mutation). In some such embodiments, a subject (e.g., a mammal, e.g., a human) may have, e.g., certain risk factors (e.g., parent or symptoms of hearing loss) of hearing loss or risk of hearing loss. In some such embodiments, a subject (e.g., a mammal, e.g., a human) has been identified as being a carrier of a mutation in a KCNQ4 gene (e.g., via genetic testing) that has not previously been identified (i.e., is not a published, known variant of a KCNQ4 gene sequence). In some such embodiments, identified mutations may be novel (i.e., not previously described in the literature), and methods of treatment for a subject suffering from or susceptible to hearing loss can be personalized to one or more mutation(s) of a particular subject (e.g., mammal, e.g., human).

[0488] In some embodiments, successful treatment of non-symptomatic sensorineural hearing loss can be determined in a subject using any conventional functional hearing tests known in the art. Non-limiting examples of functional hearing tests are various types of audiometric assays (e.g., pure-tone testing, speech testing, middle ear test, auditory brainstem response, and otoacoustic emissions).

c. Methods of Increasing Expression of KCNQ4

[0489] The present disclosure provides methods of increasing expression of a functional (e.g., gain-of-function) KNCQ4 gene product (e.g., a wild type KCNQ4, e.g., a codon optimized KCNQ4, a Kv7.4 protein) in a cell (e.g., a mammalian cell). In some such embodiments, such methods comprise introducing any compositions (e.g., a construct encoding a functional KCNQ4, e.g., a wild type KCNQ4, e.g., a codon optimized KCNQ4) described herein into a cell (e.g., a mammalian cell). In some embodiments, introduction is in vitro. In some embodiments, introduction is ex vivo. In some embodiments, introduction is in vivo.

[0490] In some such embodiments, a cell is a mammalian cell. In some embodiments, a mammalian cell is a cochlear cell. In some embodiments, a cochlear cell is a hair cell. In some embodiments, a cochlear hair cell is an inner hair cell. In some embodiments, a cochlear hair cell is an outer hair cell. In such some embodiments, a mammalian cell is a human cell (e.g., a human cochlear outer hair cell).

[0491] Methods for introducing any compositions described herein into a mammalian cell are known in the art (e.g., via lipofection or through use of a viral construct, e.g., any viral constructs described herein). In some embodiments, an increase in expression of a KCNQ4 gene product (e.g., a gene product encoding a functional KCNQ4) is determined, e.g., as compared to a control or to a level of expression of a KCNQ4 gene product prior to introduction of a composition as described herein. In some embodiments a decrease in a KCNQ4 variant gene product (e.g., a gene product that occurs as a result of a variant KCNQ4 gene) occurs concomitantly or sequentially with an increase in a functional KCNQ4 gene product.

d. Methods of Decreasing Expression of Endogenous KCNQ4 and/or Replacing Endogenous KCNQ4

[0492] The present disclosure provides methods of decreasing expression of an endogenous KNCQ4 gene product (e.g., a wild type KCNQ4, e.g., a loss-of-function KCNQ4 variant) in a cell (e.g., a mammalian cell) and/or replacing it with a different, functional (e.g., gain-of-function) KCNQ4 (e.g., a codon-optimized KCNQ4). In some embodiments, as described herein, endogenous KCNQ4 may be replaced by a codon-optimized version that has been engineered to resist inhibitory nucleic acid-mediated degradation (e.g., miRNA-mediated degradation). In some such embodiments, miRNA-mediated degradation is due to endogenous and/or exogenously introduced miRNAs. In some embodiments as described herein, a genome editing strategy may be or comprise, e.g., introduction of an exogenous miRNA and may be preceding, followed or substantially simultaneously include replacement of endogenous KCNQ4 gene with a codon-optimized KCNQ4 gene.

[0493] In some such embodiments, such methods comprise introducing any compositions (e.g., a construct encoding a functional KCNQ4, e.g., a wild type KCNQ4, e.g., a codon optimized KCNQ4) described herein into a cell (e.g., a mammalian cell). In some embodiments, introduction is in vitro. In some embodiments, introduction is ex vivo. In some embodiments, introduction is in vivo.

[0494] In some such embodiments, a cell is a mammalian cell. In some embodiments, the mammalian cell is a cochlear cell. In some embodiments, a cochlear cell is a hair cell. In some embodiments, a cochlear hair cell is an inner hair cell. In some embodiments, a cochlear hair cell is an outer hair cell. In some such embodiments, a mammalian cell is a human cell (e.g., a human cochlear outer hair cell).

[0495] Methods for introducing any compositions described herein into a mammalian cell are known in the art (e.g., via lipofection or through use of a viral construct, e.g., any viral constructs described herein). In some embodiments, a decrease in expression of an endogenous KCNQ4 gene product is determined, e.g., as compared to a control or to a level of expression of a KCNQ4 gene product prior to introduction of a composition as described herein. In some embodiments a decrease in an endogenous KCNQ4 gene product occurs concomitantly or sequentially with an increase in a codon-optimized KCNQ4 gene product.

e. Methods of Decreasing Expression of a Loss-of-Function KCNQ4 Variant

[0496] The present disclosure provides methods of decreasing expression of a loss-of-function KNCQ4 variant gene product in a cell (e.g., a mammalian cell). In some such embodiments, such methods comprise introducing any compositions (e.g., an inhibitory nucleic acid) described herein into a cell (e.g., a mammalian cell). In some embodiments, introduction is in vitro. In some embodiments, introduction is ex vivo. In some embodiments, introduction is in vivo.

[0497] In some such embodiments, a cell is a mammalian cell. In some embodiments, a mammalian cell is a cochlear cell. In some embodiments, a cochlear cell is a hair cell. In some embodiments, a cochlear hair cell is an inner hair cell. In some embodiments, a cochlear hair cell is an outer hair cell. In some such embodiments, a mammalian cell is a human cell (e.g., a human cochlear outer hair cell).

[0498] Methods for introducing any compositions described herein into a mammalian cell are known in the art (e.g., via lipofection or use of a viral construct, e.g., any viral constructs described herein). A decrease in expression of a KCNQ4 variant gene product is determined, e.g., as compared to a control or to a level of expression of aKCNQ4 variant gene product prior to introduction of a composition as described herein. In some embodiments a decrease in KCNQ4 variant occurs concomitantly or sequentially with an increase in functional KCNQ4.

### 5. Administration

[0499] Provided herein are technologies comprising, among other things, therapeutic delivery systems for treating hearing loss (e.g., nonsyndromic sensorineural hearing loss or syndromic sensorineural hearing loss). In some embodiments the present disclosure provides compositions that are part of or comprise at least one construct, e.g., viral construct, e.g., AAV construct. In some embodiments, an inhibitory nucleic acid of the present disclosure is included within or comprises at least one construct. In some such embodiments, a construct is an AAV construct. In some embodiments, an AAV construct is used to deliver an inhibitory nucleic acid to one or more cells. In some embodiments, an inhibitory nucleic acid is included within or comprises at least one construct. In some such embodiments, a construct is an AAV construct. In some embodiments, an AAV construct is used to deliver an inhibitory nucleic acid to one or more cells. In some such embodiments, a construct encodes an inhibitory nucleic acid that may, in some embodiments, decrease expression of a potassium channel gene product, e.g., a potassium channel mRNA, e.g., KCNQ4 mRNA). In some embodiments, a single construct encodes more than one inhibitory nucleic acid molecule (e.g., more than one miRNA targeting sequence, etc.). In some embodiments, a single construct encodes 2, 3, 4, 5, 6, 7, 8, 9, or 10 inhibitory nucleic acid molecules.

[0500] Non-limiting examples of siRNAs that can decrease expression of a potassium channel gene product (e.g., protein) in a cell (e.g., a human cell, e.g., an outer hair cell) are described herein. As described herein, in some embodiments, a subject has been previously identified as having a loss-of-function KCNQ4 variant (e.g., a KCNQ4 gene having a sequence variation that results in a defect (e.g., decrease) in expression and/or activity of a KCNQ4 protein encoded by a gene or in a function that causes disease (e.g., DFNA2 or another dysfunction in a potassium channel, e.g., chronic depolarization leading to death). In some embodiments, prior to an introducing or administering step as provided herein, a subject is determined to have a KCNQ4 variant gene. In some embodiments, a method of treatment comprises detecting a variation in a KCNQ4 gene in a subject. In some embodiments, a method of treating comprises identifying or diagnosing a subject as having non-symptomatic sensorineural hearing loss.

[0501] As described herein, technologies provided by the present disclosure (e.g., expression systems, inhibitory RNAs or genome editing systems, etc.) can be implemented (e.g., administered or delivered to a cell or a subject) in a variety of ways, and different implementations may be suitable for distinct applications. For example, in some embodiments, technologies of the present disclosure are used to increase a level of a gene, decrease a level of a gene, and/or increase and decrease levels of certain genes or gene variants, simultaneously. For example, in some embodiments, technologies of the present disclosure include increasing expression of a functional KCNQ4 gene product, decreasing expression of a loss-of-function KCNQ4 gene variant, replacing a functional KCNQ4 gene product with a codon-optimized version of a KCNQ4 gene product, or any combination of increasing and decreasing thereof.

a. Routes of Administration

[0502] In some embodiments, the present disclosure provides various routes of and formulations for administration. As will be known to one of skill in the art, pharmaceutical forms suitable for injectable use include sterile aqueous solutions or dispersions and sterile powders for extemporaneous preparation of sterile injectable solutions or dispersions. Dispersions may also be prepared in glycerol, liquid polyethylene glycols, and mixtures thereof and in oils.

[0503] Under ordinary conditions of storage and use, these preparations contain a preservative to prevent growth of microorganisms. In many cases the form is sterile and fluid to the extent that easy syringability exists. It must be stable under the conditions of manufacture and storage and must be preserved against contaminating action of microorganisms, such as bacteria and fungi. In some embodiments, a carrier can be a solvent or dispersion medium containing, for example, water, ethanol, polyol (e.g., glycerol, propylene glycol, and liquid polyethylene glycol, and the like), suitable mixtures thereof, and/or vegetable oils. Proper fluidity may be maintained, for example, by use of a coating, such as lecithin, by maintenance of the required particle size in the case of dispersion and by use of surfactants. Prevention of action of microorganisms can be brought about by various antibacterial and antifungal agents, for example, parabens, chlorobutanol, phenol, sorbic acid, thimerosal, and the like. In many cases, it will be preferable to include isotonic agents, for example, sugars or sodium chloride.

[0504] Prolonged absorption of injectable compositions can be brought about use in compositions of agents delaying absorption, for example, aluminum monostearate and gelatin. For administration of an injectable aqueous solution, for example, a solution may be suitably buffered, if necessary, and a liquid diluent first rendered isotonic with sufficient saline or glucose. These particular aqueous solutions are especially suitable for intravenous, intramuscular, subcutaneous and intraperitoneal administration. In this connection, a sterile aqueous medium that can be employed will be known to those of skill in the art. For example, one dosage may be dissolved in 1 ml of isotonic NaCl solution and either added to 1000 ml of hypodermoclysis fluid or injected at a proposed site of infusion, (see for example, “Remington's Pharmaceutical Sciences” 15th Edition, pages 1035-1038 and 1570-1580, which is incorporated in its entirety herein by reference). Some variation in dosage will necessarily occur depending on condition of a host. A person responsible for administration will, in any event, determine an appropriate dose for an individual host.

[0505] In some embodiments, sterile injectable solutions are prepared by incorporating active rAAV in a required amount in an appropriate solvent with various other ingredients enumerated herein, as required, followed by filtered sterilization. Generally, dispersions are prepared by incorporating various sterilized active ingredients into a sterile vehicle which contains basic dispersion medium and required other ingredients from those enumerated above. In the case of sterile powders for preparation of sterile injectable solutions, in some embodiments, preferred methods of preparation are vacuum-drying and freeze-drying techniques which yield a powder of active ingredient plus any additional desired ingredient from a previously sterile-filtered solution thereof.

[0506] In some embodiments, rAAV compositions disclosed herein may also be formulated in a neutral or salt form. Pharmaceutically-acceptable salts, include acid addition salts (formed with free amino groups of a given protein) and which are formed with inorganic acids such as, for example, hydrochloric or phosphoric acids, or such organic acids as acetic, oxalic, tartaric, mandelic, and the like. Salts formed with free carboxyl groups can also be derived from inorganic bases such as, for example, sodium, potassium, ammonium, calcium, or ferric hydroxides, and such organic bases as isopropylamine, trimethylamine, histidine, procaine and the like. Upon formulation, solutions can be administered in a manner compatible with the dosage formulation and in such amount as is therapeutically effective. Formulations are easily administered in a variety of dosage forms such as injectable solutions, drug-release capsules, and the like.

[0507] Delivery vehicles such as liposomes, nanocapsules, microparticles, microspheres, lipid particles, vesicles, and the like, may be used for introduction of compositions of the present disclosure into suitable host cells. In particular, in some embodiments, rAAV-construct delivered transgenes may be formulated for delivery either encapsulated in a lipid particle, a liposome, a vesicle, a nanosphere, or a nanoparticle or the like.

[0508] Such formulations may be preferred for introduction of pharmaceutically acceptable formulations of nucleic acids or rAAV constructs disclosed herein. Formation and use of liposomes is generally known to those of skill in the art. Recently, liposomes were developed with improved serum stability and circulation half-times (U.S. Pat. No. 5,741,516, which is incorporated in its entirety herein by reference). Further, various methods of liposome and liposome like preparations as potential drug carriers have been described (U.S. Pat. Nos. 5,567,434; 5,552,157; 5,565,213; 5,738,868 and 5,795,587, each of which is incorporated in its entirety herein by reference).

[0509] Liposomes have been used successfully with a number of cell types that are normally resistant to transfection by other procedures. In addition, liposomes are free of DNA length constraints that are typical of viral-based delivery systems. Liposomes have been used effectively to introduce genes, drugs, radiotherapeutic agents, viruses, transcription factors and allosteric effectors into a variety of cultured cell lines and animals. In addition, several successful clinical trials examining efficacy of liposome-mediated drug delivery have been completed.

[0510] Liposomes are formed from phospholipids that are dispersed in an aqueous medium and spontaneously form multilamellar concentric bilayer vesicles (also termed multilamellar vesicles (MLVs). MLVs generally have diameters of from 25 nm to 4 Tm. Sonication of MLVs results in formation of small unilamellar vesicles (SUVs) with diameters in a range of approximately 200 to 500.ANG., containing an aqueous solution in the core.

[0511] Alternatively, nanocapsule formulations of rAAV may be used. Nanocapsules can generally entrap substances in a stable and reproducible way. To avoid side effects due to intracellular polymeric overloading, such ultrafine particles (sized around 0.1 Tm) should be designed using polymers able to be degraded in vivo. Biodegradable polyalkyl-cyanoacrylate nanoparticles that meet these requirements are contemplated for use.

[0512] In addition to methods of delivery described above, the following techniques are also contemplated as alternative methods of delivering the rAAV compositions to a host. Sonophoresis (i.e., ultrasound) has been used and described in U.S. Pat. No. 5,656,016, which is incorporated in its entirety herein by reference, as a device for enhancing the rate and efficacy of drug permeation into and through a circulatory system. Other drug delivery alternatives contemplated are intraosseous injection (U.S. Pat. No. 5,779,708, which is incorporated in its entirety herein by reference), microchip devices (U.S. Pat. No. 5,797,898, which is incorporated in its entirety herein by reference), ophthalmic formulations (Bourlais et al., 1998, which is incorporated in its entirety herein by reference), transdermal matrices (U.S. Pat. Nos. 5,770,219 and 5,783,208, each of which is incorporated in its entirety herein by reference) and feedback-controlled delivery (U.S. Pat. No. 5,697,899, which is incorporated in its entirety herein by reference).

[0513] In some embodiments, administration of any compositions of the present disclosure may be carried out in any convenient manner, including by aerosol inhalation, injection, ingestion, transfusion, implantation or transplantation. Compositions described herein may be administered to a patient trans arterially, subcutaneously, intradermally, intranodally, intramedullary, intramuscularly, by intravenous (i.v.) injection, or intraperitoneally. In some embodiments, a nucleic acid composition of the present disclosure is administered to a patient by intradermal or subcutaneous injection. In some embodiments, a nucleic composition of the present disclosure is administered by i.v. injection.

b. Dosing

[0514] i. rAAV-KCNQ4-Inhibitory-RNA

[0515] In some embodiments, any of the methods disclosed herein comprise a dose-escalation study to assess safety and tolerability in subjects, e.g., mammals, e.g., humans, e.g., patients, with hearing loss. In some embodiments, a composition disclosed herein, e.g., rAAV-KCNQ4-Inhibitory-RNA, is administered at a dosing regimen disclosed herein. In some embodiments, the dosing regimen comprises either unilateral or bilateral intracochlear administrations of a dose, e.g., as described herein, of a composition disclosed herein, e.g., rAAV-KCNQ4-Inhibitory-RNA. In some embodiments, the dosing regimen comprises delivery in a volume of at least 0.001 mL, 0.005 mL, 0.01 mL, at least 0.02 mL, at least 0.03 mL, at least 0.04 mL, at least 0.05 mL, at least 0.06 mL, at least 0.07 mL, at least 0.08 mL, at least 0.09 mL, at least 0.10 mL, at least 0.11 mL, at least 0.12 mL, at least 0.13 mL, at least 0.14 mL, at least 0.15 mL, at least 0.16 mL, at least 0.17 mL, at least 0.18 mL, at least 0.19 mL, or at least 0.20 mL per cochlea. In some embodiments, the dosing regimen comprises delivery in a volume of at most 0.30 mL, at most 0.25 mL, at most 0.20 mL, at most 0.15 mL, at most 0.14 mL, at most 0.13 mL, at most 0.12 mL, at most 0.11 mL, at most 0.10 mL, at most 0.09 mL, at most 0.08 mL, at most 0.07 mL, at most 0.06 mL, at most 0.05 mL, at most 0.01 mL, at most 0.005 mL, or at most 0.001 mL per cochlea. In some embodiments, the dosing regimen comprises delivery in a volume of about 0.001 mL, 0.005 mL, 0.01 mL, 0.05 mL, about 0.06 mL, about 0.07 mL, about 0.08 mL, about 0.09 mL, about 0.10 mL, about 0.11 mL, about 0.12 mL, about 0.13 mL, about 0.14 mL, or about 0.15 mL per cochlea, depending on the population. In some embodiments, the dosing regimen comprises delivery in a volume of at least 0.001 mL, 0.005 mL, 0.01 mL, at least 0.02 mL, at least 0.03 mL, at least 0.04 mL, at least 0.05 mL, at least 0.06 mL, at least 0.07 mL, at least 0.08 mL, at least 0.09 mL, at least 0.10 mL, at least 0.11 mL, at least 0.12 mL, at least 0.13 mL, at least 0.14 mL, at least 0.15 mL, at least 0.16 mL, at least 0.17 mL, at least 0.18 mL, at least 0.19 mL, or at least 0.20 mL per cochlea. In some embodiments, the dosing regimen comprises delivery in a volume of at most 0.30 mL, at most 0.25 mL, at most 0.20 mL, at most 0.15 mL, at most 0.14 mL, at most 0.13 mL, at most 0.12 mL, at most 0.11 mL, at most 0.10 mL, at most 0.09 mL, at most 0.08 mL, at most 0.07 mL, at most 0.06 mL, at most 0.05 mL, at most 0.01 mL, at most 0.005 mL, or at most 0.001 mL per cochlea. In some embodiments, the dosing regimen comprises delivery in a volume of about 0.001 mL, about 0.005 mL, about 0.01 mL, 0.05 mL, about 0.06 mL, about 0.07 mL, about 0.08 mL, about 0.09 mL, about 0.10 mL, about 0.11 mL, about 0.12 mL, about 0.13 mL, about 0.14 mL, or about 0.15 mL per cochlea, depending on the population.

[0516] In some embodiments, a method disclosed herein evaluates the safety and tolerability of escalating doses of a composition disclosed herein, e.g., rAAV-KCNQ4-Inhibitory-RNA, administered via intracochlear injection to a subject, e.g., 18 to 80 years of age, with hearing loss.

[0517] In some embodiments, a method disclosed herein evaluates the safety and tolerability of escalating doses of a composition disclosed herein, e.g., rAAV-KCNQ4-Inhibitory-RNA, administered via intraocular injection to a subject, e.g., 18 to 80 years of age, with hearing loss.

[0518] In some embodiments, any of the methods disclosed herein comprise an evaluation of the safety and tolerability of a composition disclosed herein, e.g., rAAV-KCNQ4-Inhibitory-RNA. In some embodiments, evaluation of the efficacy of a composition disclosed herein, e.g., rAAV-KCNQ4-Inhibitory-RNA to treat hearing loss, is performed in a randomized, controlled setting (using a concurrent, non-intervention observation arm).

[0519] In some embodiments, any of the methods disclosed herein comprise an evaluation of the safety and tolerability of a composition disclosed herein, e.g., rAAV-KCNQ4-Inhibitory-RNA. In some embodiments, evaluation of the efficacy of a composition disclosed herein, e.g., rAAV-KCNQ4-Inhibitory-RNA to treat vision loss, is performed in a randomized, controlled setting (using a concurrent, non-intervention observation arm).

[0520] III. rAAV-KCNQ4

[0521] In some embodiments, any of the methods disclosed herein comprise a dose-escalation study to assess safety and tolerability in subjects, e.g., mammals, e.g., humans, e.g., patients, with hearing loss. In some embodiments, a composition disclosed herein, e.g., rAAV-KCNQ4, is administered at a dosing regimen disclosed herein. In some embodiments, the dosing regimen comprises either unilateral or bilateral intracochlear administrations of a dose, e.g., as described herein, of a composition disclosed herein, e.g., rAAV-KCNQ4 In some embodiments, the dosing regimen comprises delivery in a volume of at least 0.001 mL, 0.005 mL, 0.01 mL, at least 0.02 mL, at least 0.03 mL, at least 0.04 mL, at least 0.05 mL, at least 0.06 mL, at least 0.07 mL, at least 0.08 mL, at least 0.09 mL, at least 0.10 mL, at least 0.11 mL, at least 0.12 mL, at least 0.13 mL, at least 0.14 mL, at least 0.15 mL, at least 0.16 mL, at least 0.17 mL, at least 0.18 mL, at least 0.19 mL, or at least 0.20 mL per cochlea. In some embodiments, the dosing regimen comprises delivery in a volume of at most 0.30 mL, at most 0.25 mL, at most 0.20 mL, at most 0.15 mL, at most 0.14 mL, at most 0.13 mL, at most 0.12 mL, at most 0.11 mL, at most 0.10 mL, at most 0.09 mL, at most 0.08 mL, at most 0.07 mL, at most 0.06 mL, at most 0.05 mL, at most 0.01 mL, at most 0.005 mL, or at most 0.001 mL per cochlea. In some embodiments, the dosing regimen comprises delivery in a volume of about 0.001 mL, 0.005 mL, 0.01 mL, 0.05 mL, about 0.06 mL, about 0.07 mL, about 0.08 mL, about 0.09 mL, about 0.10 mL, about 0.11 mL, about 0.12 mL, about 0.13 mL, about 0.14 mL, or about 0.15 mL per cochlea, depending on the population. In some embodiments, the dosing regimen comprises delivery in a volume of at least 0.001 mL, 0.005 mL, 0.01 mL, at least 0.02 mL, at least 0.03 mL, at least 0.04 mL, at least 0.05 mL, at least 0.06 mL, at least 0.07 mL, at least 0.08 mL, at least 0.09 mL, at least 0.10 mL, at least 0.11 mL, at least 0.12 mL, at least 0.13 mL, at least 0.14 mL, at least 0.15 mL, at least 0.16 mL, at least 0.17 mL, at least 0.18 mL, at least 0.19 mL, or at least 0.20 mL per cochlea. In some embodiments, the dosing regimen comprises delivery in a volume of at most 0.30 mL, at most 0.25 mL, at most 0.20 mL, at most 0.15 mL, at most 0.14 mL, at most 0.13 mL, at most 0.12 mL, at most 0.11 mL, at most 0.10 mL, at most 0.09 mL, at most 0.08 mL, at most 0.07 mL, at most 0.06 mL, at most 0.05 mL, at most 0.01 mL, at most 0.005 mL, or at most 0.001 mL per cochlea. In some embodiments, the dosing regimen comprises delivery in a volume of about 0.001 mL, about 0.005 mL, about 0.01 mL, 0.05 mL, about 0.06 mL, about 0.07 mL, about 0.08 mL, about 0.09 mL, about 0.10 mL, about 0.11 mL, about 0.12 mL, about 0.13 mL, about 0.14 mL, or about 0.15 mL per cochlea, depending on the population.

[0522] In some embodiments, a method disclosed herein evaluates the safety and tolerability of escalating doses of a composition disclosed herein, e.g., rAAV-KCNQ4, administered via intracochlear injection to a subject, e.g., 18 to 80 years of age, with hearing loss.

[0523] In some embodiments, a method disclosed herein evaluates the safety and tolerability of escalating doses of a composition disclosed herein, e.g., rAAV-KCNQ4, administered via intraocular injection to a subject, e.g., 18 to 80 years of age, with hearing loss.

[0524] In some embodiments, any of the methods disclosed herein comprise an evaluation of the safety and tolerability of a composition disclosed herein, e.g., rAAV-KCNQ4. In some embodiments, evaluation of the efficacy of a composition disclosed herein, e.g., rAAV-KCNQ4 to treat hearing loss, is performed in a randomized, controlled setting (using a concurrent, non-intervention observation arm).

[0525] In some embodiments, any of the methods disclosed herein comprise an evaluation of the safety and tolerability of a composition disclosed herein, e.g., rAAV-KCNQ4. In some embodiments, evaluation of the efficacy of a composition disclosed herein, e.g., rAAV-KCNQ4 to treat vision loss, is performed in a randomized, controlled setting (using a concurrent, non-intervention observation arm).

### 6. Delivery Strategies

[0526] a. Nucleic Acid-Based Delivery of Inhibitory RNAs or Genome Editing Systems

[0527] In some embodiments, a genome editing system is implemented for one or more nucleic acids encoding a CRISPR nuclease and gRNA components described herein (optionally with one or more additional components). In some embodiments, a genome editing system is implemented as one or more constructs comprising such nucleic acids, for instance a viral construct such as an adeno-associated virus; and in some embodiments, a genome editing system is implemented as a combination of any of the foregoing. Additional or modified implementations that operate according to principles set forth herein will be apparent to the skilled artisan and are within the scope of this disclosure.

[0528] In one non-limiting embodiment, a construct drives expression of a genome editing system. The art is replete with suitable constructs that are useful in the present invention. Constructs to be used are suitable for replication and, optionally, integration in eukaryotic cells. Typical constructs contain transcription and translation terminators, initiation sequences, and promoters useful for regulation of expression of a desired nucleic acid sequence. Constructs of the present invention may also be used for nucleic acid standard gene delivery protocols. Methods for gene delivery are known in the art (U.S. Pat. Nos. 5,399,346, 5,580,859 & 5,589,466, incorporated by reference herein in their entireties).

[0529] CRISPR/Cas gene disruption occurs when a guide nucleic acid sequence specific for a target gene and a Cas endonuclease are introduced into a cell and form a complex that enables a Cas endonuclease to introduce a double strand break at a target gene. In some embodiments, a CRISPR system comprises an expression construct, such as, but not limited to, an pAd5F35-CRISPR construct. In other embodiments, the Cas expression construct induces expression of Cas9 endonuclease. Other endonucleases may also be used, including but not limited to Cpf1, T7, Cas3, Cas8a, Cas8b, Cas10d, Cse1, Csy1, Csn2, Cas4, Cas10, Csm2, Cmr5, Fok1, other nucleases known in the art, and any combination thereof.

[0530] In some embodiments, inducing a Cas expression construct comprises exposing a cell to an agent that activates an inducible promoter in a Cas expression construct. In such embodiments, a Cas expression construct includes an inducible promoter, such as one that is inducible by exposure to an antibiotic (e.g., by tetracycline or a derivative of tetracycline, for example doxycycline). However, it should be appreciated that other inducible promoters can be used. An inducing agent can be a selective condition (e.g., exposure to an agent, for example an antibiotic) that results in induction of an inducible promoter. This results in expression of a Cas expression construct.

[0531] In other embodiments, one or more constructs driving expression of one or more elements of a CRISPR system are introduced into a host cell, such that expression of elements of a CRISPR system direct formation of a CRISPR complex at one or more target sites. For example, a Cas enzyme, a guide sequence linked to a tracr-mate sequence, and a tracr sequence could each be operably linked to separate regulatory elements on separate constructs. Alternatively, two or more elements expressed from the same or different regulatory elements may be combined in a single construct, with one or more additional constructs providing any components of a CRISPR system not included in a first construct. CRISPR system elements that are combined in a single construct may be arranged in any suitable orientation, such as one element located 5′ with respect to (“upstream” of) or 3′ with respect to (“downstream” of) a second element. A coding sequence of one element may be located on the same or opposite strand of a coding sequence of a second element, and oriented in the same or opposite direction. In some embodiments, a single promoter drives expression of a transcript encoding a CRISPR enzyme and one or more of a guide sequence, tracr mate sequence (optionally operably linked to a guide sequence), and a tracr sequence embedded within one or more intron sequences (e.g., each in a different intron, two or more in at least one intron, or all in a single intron).

b. Viral Delivery of Genome Modifying Systems and/or Transgenes

[0532] In some embodiments, a construct may be provided to a cell in the form of a viral construct, e.g., an AAV construct. In some embodiments, a genome editing system is implemented using one or more constructs comprising such nucleic acids, for instance a viral construct such as an adeno-associated virus; and in some embodiments, a genome editing system is implemented as a combination of any of the foregoing. In some embodiments, a transgene, e.g., a gene encoding KCNQ4 (e.g., a functional KCNQ4) is administered using a viral construct. Viral construct technology is well known in the art and is described, for example, in Sambrook et al. (4^{th} Edition, Molecular Cloning: A Laboratory Manual, Cold Spring Harbor Laboratory, New York, 2012, which is incorporated in its entirety herein by reference), and in other virology and molecular biology manuals. Viruses, which are useful as constructs include, but are not limited to, retroviruses, adenoviruses, adeno-associated viruses, herpes viruses, Sindbis virus, gammaretrovirus and lentiviruses. In general, a suitable construct contains an origin of replication functional in at least one organism, a promoter sequence, convenient restriction endonuclease sites, and one or more selectable markers (e.g., WO 01/96584; WO 01/29058; and U.S. Pat. No. 6,326,193, each of which is incorporated in its entirety herein by reference). In some embodiments, the present disclosure provides methods of delivery comprising administering one or more constructs comprising one or more components that inhibit a KCNQ4 variant gene product and/or one or more constructs comprising one or more components that express an exogenous KCNQ4 (e.g., a functional KCNQ4, e.g., a wild type KCNQ4, e.g., a codon optimized KCNQ4). Without being bound by any particular theory, in embodiments where viral delivery of components to inhibit a KCNQ4 variant and express functional KCNQ4, a functional KCNQ4 is codon-optimized to resist impact of KCNQ4 inhibitory components that may exist and/or be introduced into a cell or subject into which or whom they were delivered (e.g., inhibitory nucleic acid, e.g., miRNA).

### 7. Devices and Surgical Methods

[0533] The present disclosure provides, among other things technologies (e.g., systems, methods, devices, etc.) that may be used, in some embodiments, for treating deafness and other hearing-associated diseases, disorders and conditions. Examples of such technologies are also included in, e.g., WO2017223193 and WO2019084145, each of which is herein incorporated by reference in its entirety. In some embodiments, for example, the present disclosure provides therapeutic delivery systems for treating hearing loss (e.g., nonsyndromic sensorineural hearing loss or syndromic sensorineural hearing loss). In some such embodiments, a therapeutic delivery system may include: (i) a medical device capable of creating one or a plurality of incisions in a round window membrane of an inner ear of a subject, and (ii) an effective dose of a composition (e.g., any compositions described herein). In some embodiments, a medical device includes a plurality of micro-needles.

[0534] AAV constructs are capable of constituting a full-length auditory polypeptide messenger RNA in a target cell of an inner ear. In some embodiments, the present disclosure provides a means for performing a surgical method, a method including the steps of: administering intra-cochlearly to a human subject in need thereof an effective dose of a therapeutic composition of the present disclosure. A therapeutic composition is capable of being administered by using a medical device including: a) means for creating one or a plurality of incisions in a round window membrane, and b) an effective dose of a therapeutic composition.

[0535] The present disclosure provides, among other things, surgical methods for treatment (e.g., prevention, reversal, mitigation, attenuation) of hearing loss. In one aspect, methods include the steps of: introducing into a cochlea of a human subject a first incision at a first incision point; and administering intra-cochlearly an effective dose of a therapeutic composition (e.g., any compositions described herein) as provided herein. In one embodiment, a therapeutic composition (e.g., any compositions described herein) is administered to a subject at a first incision point. In some embodiments, a therapeutic composition is administered to a subject into or through a first incision. In one embodiment, a therapeutic composition is administered to a subject into or through a cochlea oval window membrane. In one embodiment, a therapeutic composition is administered to a subject into or through a cochlea round window membrane.

[0536] For example, in some embodiments, a therapeutic composition is administered using a medical device capable of creating a plurality of incisions in a round window membrane. In some embodiments, a medical device includes a plurality of micro-needles. In some embodiments, to medical device includes a plurality of micro-needles including a generally circular first aspect, wherein each micro-needle includes a diameter of at least about 10 microns. In some embodiments, a medical device includes a base and/or a reservoir capable of holding a therapeutic composition. In some embodiments, a medical device includes a plurality of hollow micro-needles individually including a lumen capable of transferring a therapeutic composition. In some embodiments, a medical device includes a means for generating at least a partial vacuum.

a. Method of Introduction into Cochlea

[0537] The present disclosure provides, among other things, a method of introducing into a cochlea of a mammal (e.g., a human) a therapeutically effective amount of any compositions or systems as described herein. Also provided are methods of increasing expression of a functional KCNQ4 protein (e.g., a KCNQ4 protein that can be part of a functional potassium channel, e.g., a potassium channel that does not result in chronically depolarized cells, e.g., outer hair cells) in a cell (e.g., a hair cell, e.g., an outer hair cell) in a cochlea of a mammal (e.g., a human) that include introducing into a cochlea of a subject a therapeutically effective amount of any compositions described herein.

[0538] Also provided are methods of treating non-symptomatic sensorineural hearing loss in a subject (e.g., a human) identified as having a defective (i.e., non-functional) KCNQ4 gene product. In some such embodiments, methods include administering a therapeutically effective amount of any compositions described herein into a cochlea of a subject. In some embodiments, administration may include administering one or more compositions (e.g., one composition comprising an inhibitory nucleic acid and another composition comprising a construct encoding a functional KCNQ4; e.g., one composition comprising a construct encoding a functional KCNQ4 and another composition comprising a growth factor or other agent that will maintain ear hair cell health, etc.). In some embodiments, methods of treating may further comprise administering a cochlear implant to a subject (e.g., at substantially the same time as any compositions described herein are administered to a subject).

[0539] In some embodiments a method of treating comprises administering two or more doses of any compositions described herein. In some such embodiments, compositions are introduced or administered into a cochlea of a mammal or subject. In some embodiments a method of treating comprises introducing or administering a first dose of a composition into a cochlea of a subject, assessing hearing function of a subject following introducing or administering of a first dose, and administering at least one additional dose of a composition into a cochlea of a subject if a subject is found not to have a hearing function within a normal range (e.g., as determined using any test for hearing known in the art).

[0540] In some embodiments a method of treatment comprises intra-cochlear administration. In some such embodiments of any methods described herein, compositions are administered through use of a medical device (e.g., any exemplary medical devices described herein). In some embodiments, intra-cochlear administration can be performed as described herein or known in the art. For example, in some embodiments, a composition can be administered or introduced into a cochlea using the following surgical technique: first using visualization with a 0 degree, 2.5-mm rigid endoscope, an external auditory canal is cleared and a round knife is used to sharply delineate an approximately 5-mm tympanomeatal flap. A tympanomeatal flap is then elevated and the middle ear is entered posteriorly. The chorda tympani nerve is identified and divided, and a currette is used to remove the scutal bone, exposing the round window membrane. To enhance apical distribution of the administered or introduced composition, a surgical laser may be used to make a small 2-mm fenestration in the oval window to allow for perilymph displacement during trans-round window membrane infusion of the composition. The microinfusion device is then primed and brought into the surgical field. The device is maneuvered to the round window, and the tip is seated within the bony round window overhang to allow for penetration of the membrane by the microneedle(s). The footpedal is engaged to allow for a measured, steady infusion of the composition. The device is then withdrawn and the round window and stapes foot plate are sealed with a gelfoam patch. One of skill in the art will understand that other variations or methods of intra-cochlear administration are available. In some embodiments, any such acceptable methods may be used to deliver one or more compositions and/or treat one or more subjects as described herein.

[0541] In some embodiments, an exemplary device for use in any of the methods disclosed herein is described in FIGS. 32-35. FIG. 35 illustrates an exemplary device 10 for delivering fluid to an inner ear. Device 10 includes a knurled handle 12, and a distal handle adhesive 14 (for example, an epoxy such as Loctite 4014) that couples to a telescoping hypotube needle support 24. The knurled handle 12 (or handle portion) may include kurling features and/or grooves to enhance the grip. The knurled handle 12 (or handle portion) may be from about 5 mm to about 15 mm thick or from about 5 mm to about 12 mm thick, or from about 6 mm to about 10 mm thick, or from about 6 mm to about 9 mm thick, or from about 7 mm to about 8 mm thick. The knurled handle 12 (or handle portion) may be hollow such that fluid may pass through the device 10 during use. The device 10 may also include a proximal handle adhesive 16 at a proximal end 18 of the knurled handle 12, a needle sub-assembly 26 (shown in FIG. 33) with stopper 28 (shown in FIG. 33) at a distal end 20 of the device 10, and a strain relief feature 22. Strain relief feature 22 may be composed of a Santoprene material, a Pebax material, a polyurethane material, a silicone material, a nylon material, and/or a thermoplastic elastomer. The telescoping hypotube needle support 24 surrounds and supports a bent needle 38 (shown in FIG. 33) disposed therewithin.

[0542] Referring still to FIG. 32, the stopper 28 may be composed of a thermoplastic material or plastic polymer (such as a UV-cured polymer), as well as other suitable materials, and may be used to prevent the bent needle 38 from being inserted too far into the ear canal (for example, to prevent insertion of bent needle 38 into the lateral wall or other inner ear structure). Device 10 also may include a tapered portion 23 disposed between the knurled handle 12 and the distal handle adhesive 14 that is coupled to the telescoping hypotube needle support 24. The knurled handle 12 (or handle portion) may include the tapered portion 23 at the distal end of the handle portion 12. Device 10 may also include tubing 36 fluidly connected to the proximal end 16 the device 10 and acts as a fluid inlet line connecting the device to upstream components (for example, a pump, a syringe, and/or upstream components which, in some embodiments, may be coupled to a control system and/or power supply (not shown)). In some embodiments, the bent needle 38 (shown in FIG. 33) extends from the distal end 20, through the telescoping hypotube needle support 24, through the tapered portion 23, through the knurled handle 12, and through the strain relief feature 22 and fluidly connects directly to the tubing 36. In other embodiments, the bent needle 38 fluidly connects with the hollow interior of the knurled handle (for example, via the telescoping hypotube needle support 24) which in turn fluidly connects at a proximal end 16 with tubing 36. In embodiments where the bent needle 38 does not extend all the way through the interior of the device 10, the contact area (for example, between overlapping nested hypotubes 42), the tolerances, and/or sealants between interfacing components must be sufficient to prevent therapeutic fluid from leaking out of the device 10 (which operates at a relatively low pressure (for example, from about 1 Pascal to about 50 Pa, or from about 2 Pa to about 20 Pa, or from about 3 Pa to about 10 Pa)).

[0543] FIG. 33 illustrates a sideview of the bent needle sub-assembly 26, according to aspects of the present disclosed embodiments. Bent needle sub-assembly 26 includes a needle 38 that has a bent portion 32. Bent needle sub-assembly 26 may also include a stopper 28 coupled to the bent portion 32. The bent portion 32 includes an angled tip 34 at the distal end 20 of the device 10 for piercing a membrane of the ear (for example, the RWM). The needle 38, bent portion 32, and angled top 34 are hollow such that fluid may flow therethrough. The angle 46 (as shown in FIG. 35) of the bent portion 32 may vary. A stopper 28 geometry may be cylindrical, disk-shaped, annulus-shaped, dome-shaped, and/or other suitable shapes. Stopper 28 may be molded into place onto bent portion 32. For example, stopper 28 may be positioned concentrically around the bent portion 32 using adhesives or compression fitting. Examples of adhesives include an UV cure adhesive (such as Dymax 203A-CTH-F-T), elastomer adhesives, thermoset adhesives (such as epoxy or polyurethane), or emulsion adhesives (such as polyvinyl acetate). Stopper 28 fits concentrically around the bent portion 32 such that angled tip 34 is inserted into the ear at a desired insertion depth. The bent needle 38 may be formed from a straight needle using incremental forming, as well as other suitable techniques.

[0544] FIG. 34 illustrates a perspective view of exemplary device 10 for delivering fluid to an inner ear. Tubing 36 may be from about 1300 mm in length (dimension 11 in FIG. 34) to about 1600 mm, or from about 1400 mm to about 1500 mm, or from about 1430 mm to about 1450 mm. Strain release feature 22 may be from about 25 mm to about 30 mm in length (dimension 15 in FIG. 34), or from about 20 mm to about 35 mm in length. Handle 12 may be about 155.4 mm in length (dimension 13 in FIG. 34), or from about 150 mm to about 160 mm, or from about 140 mm to about 170 mm. The telescoping hypotube needle support 24 may have two or more nested hypotubes, for example three nested hypotubes 42A, 42B, and 42C, or four nested hypotubes 42A, 42B, 42C, and 42D. The total length of hypotubes 42A, 42B, 42C and tip assembly 26 (dimension 17 in FIG. 34) may be from about 25 mm to about 45 mm, or from about 30 mm to about 40 mm, or about 35 mm. In addition, telescoping hypotube needle support 24 may have a length of about 36 mm, or from about 25 mm to about 45 mm, or form about 30 mm to about 40 mm. The three nested hypotubes 42A, 42B, and 42C each may have a length of 3.5 mm, 8.0 mm, and 19.8 mm, respectively, plus or minus about 20%. The inner-most nested hypotube (or most narrow portion) of the telescoping hypotube needle support 24 may be concentrically disposed around needle 38.

[0545] FIG. 35 illustrates a perspective view of bent needle sub-assembly 26 coupled to the distal end 20 of device 10, according to aspects of the present disclosed embodiments. As shown in FIG. 35, bent needle sub-assembly 26 may include a needle 38 coupled to a bent portion 32. In other embodiments, the bent needle 38 may be a single needle (for example, a straight needle that is then bent such that it includes the desired angle 46). Needle 38 may be a 33-gauge needle, or may include a gauge from about 32 to about 34, or from about 31 to 35. At finer gauges, care must be taken to ensure tubing 36 is not kinked or damaged. Needle 38 may be attached to handle 12 for safe and accurate placement of needle 38 into the inner ear. As shown in FIG. 35, bent needle sub-assembly 26 may also include a stopper 28 disposed around bent portion 32. FIG. 35 also shows that bent portion 32 may include an angled tip 34 for piercing a membrane of the ear (for example, the RWM). Stopper 28 may have a height 48 of about 0.5 mm, or from about 0.4 mm to about 0.6 mm, or from about 0.3 mm to about 0.7 mm. Bent portion 32 may have a length 52 of about 1.45 mm, or from about 1.35 mm to about 1.55 mm, or from about 1.2 mm to about 1.7 mm. In other embodiments, the bent portion 32 may have a length greater than 2.0 mm such that the distance between the distal end of the stopper 28 and the distal end of the angled tip 34 is from about 0.5 mm to about 1.7 mm, or from about 0.6 mm to about 1.5 mm, or from about 0.7 mm to about 1.3 mm, or from about 0.8 mm to about 1.2 mm. FIG. 35 shows that stopper 28 may have a geometry that is cylindrical, disk-shaped, and/or dome-shaped. A person of ordinary skill will appreciate that other geometries could be used.

[0546] In some embodiments, a delivery approach as disclosed herein comprises a synthetic AAV capsid (e.g., AAV Anc80) for transduction of inner ear cells, and/or a device for targeted delivery directly to the cochlea. In certain embodiments, the present disclosure provides methods and compositions suitable for transduction of inner ear cells.

[0547] In some embodiments of any of the methods described herein, any composition described herein is administered to the subject into or through the cochlea oval window membrane. In some embodiments of any of the methods described herein, any of the compositions described herein is administered to the subject into or through the cochlea round window membrane. In some embodiments of any of the methods described herein, the composition is administered using a medical device capable of creating a plurality of incisions in the round window membrane. In some embodiments, the medical device includes a plurality of micro-needles. In some embodiments, the medical device includes a plurality of micro-needles including a generally circular first aspect, where each micro-needle has a diameter of at least about 10 microns. In some embodiments, the medical device includes a base and/or a reservoir capable of holding the composition. In some embodiments, the medical device includes a plurality of hollow micro-needles individually including a lumen capable of transferring the composition. In some embodiments, the medical device includes a means for generating at least a partial vacuum.

[0548] In some embodiments, also disclosed herein is a sterile, one-time use delivery device for intracochlear administration, to deliver a composition disclosed herein, e.g., rAAV-KCNQ4, e.g., rAAV-KCNQ4-Inhibitory-RNA, to perilymph fluid of inner ear through a round window membrane with a vent located in a stapes footplate. In some embodiments, in this intracochlear administration approach, a composition disclosed herein, e.g., e.g., rAAV-KCNQ4, e.g., rAAV-KCNQ4-Inhibitory-RNA, can be administered into the scala tympani through the round window membrane, with a vent in a stapes footplate within the oval window, such that composition is perfused through scala tympani, then through scala vestibuli via connection at the helicotrema, and follows the fluid path to a vent in a stapes footplate (FIGS. 29A-29B).

### 9. Evaluating Hearing Loss and Recovery

[0549] a. Auditory Testing

[0550] In some embodiments, hearing function is determined using auditory brainstem response measurements (ABRs). In some embodiments, hearing is tested by measuring distortion product optoacoustic emissions (DPOAEs). In some such embodiments, measurements are taken from one or both ears of a subject. In some such embodiments, recordings are compared to prior recordings for the same subject and/or known thresholds on such response measurements used to define, e.g., hearing loss versus acceptable hearing ranges to be defined as normal hearing. In some embodiments, a subject has ABR and/or DPOAE measurements recorded prior to receiving any treatment. In some embodiments a subject treated with one or more technologies described herein will have improvements on ABR and/or DPOAE measurements after treatment as compared to before treatment. In some embodiments, ABR and/or DPOAE measurements are taken after treatment is administered and at regular follow-up intervals post-treatment.

[0551] In some embodiments, hearing function is determined using speech pattern recognition or is determined by a speech therapist. In some embodiments, hearing function is determined by pure tone testing. In some embodiments, hearing function is determined by bone conduction testing. In some embodiments, hearing function is determined by acoustic reflex testing. In some embodiments hearing function is determined by tympanometry. In some embodiments, hearing function is determined by any combination of hearing analysis known in the art. In some such embodiments, measurements are taken holistically, and/or from one or both ears of a subject. In some such embodiments, recordings and/or professional analysis are compared to prior recordings and/or analysis for the same subject and/or known thresholds on such response measurements used to define, e.g., hearing loss versus acceptable hearing ranges to be defined as normal hearing. In some embodiments, a subject has speech pattern recognition, pure tone testing, bone conduction testing, acoustic reflex testing and/or tympanometry measurements and/or analysis conducted prior to receiving any treatment.

[0552] In some embodiments a subject treated with one or more technologies described herein will have improvements on speech pattern recognition, pure tone testing, bone conduction testing, acoustic reflex testing and/or tympanometry measurements after treatment as compared to before treatment. In some embodiments, speech pattern recognition, pure tone testing, bone conduction testing, acoustic reflex testing and/or tympanometry measurements are taken after treatment is administered and at regular follow-up intervals post-treatment.

b. Methods of Detecting or Characterizing

[0553] Methods of detecting expression and/or activity of KCNQ4 are known in the art. In some embodiments, level of expression of KCNQ4 protein can be detected directly (e.g., detecting KCNQ4 protein, detecting KCNQ4 mRNA etc.). Non-limiting examples of techniques that can be used to detect expression and/or activity of KCNQ4 directly include, e.g., real-time PCR, Western blotting, immunoprecipitation, immunohistochemistry, or immunofluorescence. In some embodiments, expression of KCNQ4 protein can be detected indirectly (e.g., through functional hearing tests, ABRs, DPOAEs, etc.).

[0554] In some embodiments, tissue samples (e.g., comprising one or more hair cells, e.g., comprising one or more hair cells) can be evaluated for morphology of hair cells before and after administration of any agents (e.g., compositions, e.g., compositions comprising constructs, etc.) as described herein. In some such embodiments, standard immunohistochemical or histological analyses can be performed. In some embodiments, if cells are used in vitro or ex vivo, additional immunocytochemical or immunhistochemical analyses can be performed. In some embodiments, one or more assays of one or more proteins or transcripts (e.g., western blot, ELISA, polymerase chain reactions) can be performed on one or more samples from a subject or an in vitro cell population.

[0555] The disclosure is further described in detail by reference to the following experimental examples. These examples are provided for purposes of illustration only, and are not intended to be limiting unless otherwise specified. Thus, the disclosure should in no way be construed as being limited to the following examples, but rather should be construed to encompass any and all variations that become evident as a result of the teaching provided herein.

[0556] For example, other assays, including those described in the Example section herein as well as those that are known in the art, can also be used in accordance with the present disclosure.

### EXAMPLES

### Example 1: shRNA-Mediated Knockdown of KCNQ4

[0557] The present example demonstrates that knockdown of KCNQ4 can be achieved using shRNA and a reporter construct to measure KCNQ4 expression in human cells (FIG. 2; see also FIG. 4 (top)). FIGS.

[0558] The following shRNA constructs and KCNQ4 constructs were tested in HEK293 cells: sh395, sh909, sh1095, sh1531, sh1593, sh1677, sh1721, and sh1827 (see FIG. 3). The following constructs were tested in HEK293 cells as a positive control (e.g., as a reference for maximum knockdown of KCNQ4 that can be achieved): SaCas9+sgRNA 447Fw+KCNQ4 (lane 11). A shVEGF construct (targeting VEGF) and KCNQ4 construct were tested in HEK293 cells as a negative control (lane 10). In addition, only the KCNQ4 construct was tested in HEK293 cells as a negative control (lane 12). FIG. 3 shows levels of expression of KCNQ4 in HEK293 cells with or without treatment with exemplary shRNA-mediated knockdown (lanes 2-9) and CRISPR-mediated knockdown (lane 11) (N=4 biological replicates) compared to controls (lanes 10 and 12). The level of expression of KCNQ4 was most reduced by sh1827 and sgRNA 447Fw in this example. FIGS. 11 and 12 each show efficacy of knockdown with each of the shRNA constructs as well as an empty shRNA construct (“Mock”). Levels of KCNQ4 were measured using quantitative PCR, normalized to GAPDH. Two independent biological replicates were performed (FIGS. 11 and 12), each of which had three replicates per condition.

### Example 2: miR-Mediated Knockdown of KCNQ4

[0559] The present example describes design of compositions for miR-mediated knockdown of KCNQ4. In addition, the present example demonstrates miR-mediated knockdown of KCNQ4 in human cells using compositions and methods described herein.

### Example 2.1: miRNA Construct Design and Methods

[0560] Eight miRNA targeting constructs for inhibiting KCNQ4 expression were designed using iDesigner (see FIG. 5). The top off-targets for sequence 1, 2, and 4-7 shown in FIG. 30 are displayed in FIG. 31.

[0561] As described herein, miRNA KCNQ4 targeting sequences (based on the KCNQ4 targeting sequences presented in FIG. 30) were engineered into a variety of miRNA scaffolds, and evaluated for efficiency of KCNQ4 knockdown (see FIGS. 2, 4, 7-9). In particular, a KCNQ4-mScarlet knockdown reporter assay (FIG. 7), luciferase reporter assays (FIGS. 8 and 13), and a FLIPR assay were used to assess KCNQ4 knockdown efficiency of microRNA constructs and compositions described herein.

### Example 2.2: Results

[0562] In one experiment, HEK293 cells were contacted with a control or one of fifteen different miRNA constructs targeting KCNQ4 and evaluated using a luciferase reporter assay as described herein (see FIGS. 14A-14B). In particular, six human KCNQ4 targeting sequences within a miR-155 scaffold [miR1-155 (SEQ ID NO: 56), miR2-155 (SEQ ID NO: 57), miR4-155 (SEQ ID NO: 58), miR5-155 (SEQ ID NO: 59), miR6-155 (SEQ ID NO: 60), miR7-155 (SEQ ID NO: 61)], and nine microRNA scaffolds with miR1 targeting sequences [miR1-16 (SEQ ID NO: 62), miR1-26 (SEQ ID NO: 63), miR1-96 (SEQ ID NO: 64), miR1-122 (SEQ ID NO: 65), miR1-135 (SEQ ID NO: 66), miR1-182 (SEQ ID NO: 67), miR1-183 (SEQ ID NO: 68), miR1-335 (SEQ ID NO: 69), miR1-451 (SEQ ID NO: 70)] were tested for KCNQ4 knockdown efficiency (see FIGS. 14A-14B). Immunofluorescent images were captured at 24 and 48 hours post-transfection, and cells were harvested for Dual-Glo Luciferase reporter assay as described by the manufacturer's protocol (Promega). Luminescence was measured for 10 seconds per well from the top of the plate in a standard luminometer.

[0563] Among these constructs, scaffolds exhibiting effective KCNQ4 knockdown included miR-26, miR-16, miR-96, miR-135b, and miR-155 (see FIGS. 14A-14B). The level of KCNQ4 remaining in each of these miRs was about 9.8% (miR-26); 11.4% (miR-16); 13.0% (miR-96); 14.1% (miR-135b); and 14.7% (miR-155). These data also show that, among the constructs tested, KCNQ4 targeting sequences that exhibited effective KCNQ4 knockdown were RNAi_ID6 (SEQ ID NO: 76), RNAi_ID4 (SEQ ID NO: 74), RNAi_ID5 (SEQ ID NO: 75), RNAi_ID2 (SEQ ID NO: 72), and RNAi_ID1 (SEQ ID NO: 71), respectively. The level of KCNQ4 remaining in each condition was RNAi_ID6 (17.7%); RNAi_ID4 (20.9%); RNAi_ID5 (23.7%); RNAi_ID2 (25.3%); and RNAi_ID1 (27.4%).

[0564] These results surprisingly show, for example, that miR-based constructs demonstrated substantially increased efficiency relative to the shRNA (as measured by KCNQ4 knockdown). For instance, when comparing KCNQ4 knockdown efficiency of an shRNA1095 construct (SEQ ID NO: 50) to an miR6 construct (SEQ ID NO: 211) (each of which comprise a KCNQ4 targeting sequence CTGGTACTACTATGACAGTAT), the efficiency of the miR6 construct was increased as compared to the shRNA construct (see, e.g., FIG. 3 vs FIGS. 14A-14B).

[0565] miR-mediated knockdown of KCNQ4 using a set of thirty-three miRNA compositions was also evaluated using a dual luciferase reporter assay (see TABLE 3). HEK cells (seeded at 4×10⁴ cells/well) were transfected with 600 ng of exemplary human microRNA plasmid DNA or control CAG.GFP plasmid DNA, and 400 ng of Dual Luciferase reporter DNA. Two days post-transfection, a dual luciferase assay (Promega) was run following standard protocols, and luciferase signals were read on a standard plate reader. FIG. 15 shows Renilla luciferase signals normalized to Firefly luciferase signals, and then normalized to an CAG.EGFP control plasmid (N=4; also see TABLE 3). A variety of levels of KCNQ4 knockdown with microRNA plasmids was observed, ranging from almost no knockdown to nearly 80% knockdown (see FIG. 15).

TABLE 3
Results of miR-mediated knockdown of KCNQ4 using scaffolds
and targeting sequences described herein.

| MIRNA | ID | AVERAGE | ST DEV | ST ERROR |
|---|---|---|---|---|
| CAG.EGFP | CAG | 100.0% | 0 | 0 |
| miR2i_miR5u-26** | 30 | 21.4% | 7.7% | 3.8% |
| miR6-26** | 20 | 28.0% | 6.3% | 3.1% |
| miR2i_miR5u-16** | 24 | 30.1% | 2.2% | 1.1% |
| miR5i_miR6u-26** | 34 | 30.2% | 7.7% | 3.8% |
| miR4i_miR6u-26** | 33 | 32.3% | 9.2% | 4.6% |
| miR2i_miR6u-26** | 31 | 33.4% | 9.3% | 4.6% |
| miR4i_miR5u-26** | 32 | 34.2% | 6.1% | 3.1% |
| miR1-26 | 22 | 35.9% | 4.6% | 2.3% |
| miR2-26** | 11 | 36.9% | 14.7% | 7.4% |
| miR4i_miR6u-96** | 5 | 38.3% | 8.9% | 4.5% |
| miR2i_miR6u-96 | 3 | 39.0% | 5.3% | 2.7% |
| miR2i_miR4u-26 | 29 | 39.9% | 7.5% | 3.8% |
| miR4i_miR5u-16 | 26 | 40.3% | 8.4% | 4.2% |
| miR2-16 | 10 | 42.0% | 21.7% | 10.9% |
| miR5i_miR6u-96 | 6 | 42.2% | 11.2% | 5.6% |
| miR2-96 | 12 | 43.6% | 4.9% | 2.5% |
| miR6-96 | 21 | 45.0% | 10.9% | 5.5% |
| miR2i_miR4u-16 | 23 | 45.1% | 8.7% | 4.3% |
| miR1-16 | 7 | 45.6% | 7.7% | 3.9% |
| miR5-26 | 17 | 46.7% | 9.9% | 5.0% |
| miR4-16 | 13 | 47.0% | 11.4% | 5.7% |
| miR5i_miR6u-16 | 28 | 47.6% | 21.2% | 10.6% |
| miR4-26 | 14 | 48.2% | 8.2% | 4.1% |
| miR4i_miR6u-16 | 27 | 48.3% | 9.6% | 4.8% |
| miR1-96 | 8 | 48.6% | 19.9% | 10.0% |
| miR5-16 | 16 | 51.4% | 12.4% | 6.2% |
| miR2i_miR6u-16 | 25 | 55.8% | 14.8% | 7.4% |
| miR6-16 | 19 | 57.4% | 19.2% | 9.6% |
| miR2i_miR5u-96 | 2 | 65.1% | 14.4% | 7.2% |
| miR5-96 | 18 | 73.5% | 22.3% | 11.1% |
| miR4i_miR5u-96 | 4 | 74.4% | 9.9% | 5.0% |
| miR2i_miR4u-96 | 1 | 85.5% | 24.2% | 12.1% |
| miR4-96 | 15 | 105.3% | 42.0% | 17.3% |

**MicroRNA plasmids that exhibited residual KCNQ4 reporter activity ranging from 21.4-38.3%.

[0566] An off-target reporter assay was also used to evaluate miRNA-mediated KCNQ4 knockdown using constructs and compositions described herein (see FIG. 16). HEK cells (seeded at 4×10⁴ cells/well) were transfected with 600 ng of human microRNA plasmid DNA or control CAG.GFP plasmid DNA, and 400 ng of Dual Luciferase off-target reporter DNA. Eleven microRNA plasmids were tested (see FIG. 16, where the number on the x-axis corresponds to the number in the “ID” column of TABLE 3). Two days post-transfection, a dual luciferase assay (Promega) was run following standard protocols, and luciferase signals were read on a standard plate reader. FIG. 16 shows Renilla luciferase signals normalized to Firefly luciferase signals, and then normalized to an CAG.EGFP control construct for eleven miR constructs (N=4). As can be seen in FIG. 16, some miR constructs give more knockdown of the off-target reporter, which suggests more likelihood of off-target effects and led to exclusion of those plasmids. Constructs that showed greater than 75% signal (less than 25% knockdown) were considered for other experiments described herein.

[0567] A passenger reporter assay was also used to assess miRNA-mediated KCNQ4 knockdown using constructs and compositions described herein (see FIG. 17). HEK cells (seeded at 4×10⁴ cells/well) were transfected with 600 ng of human microRNA plasmid DNA or control CAG.GFP plasmid DNA, and 400 ng of Dual Luciferase passenger reporter DNA. Eleven microRNA plasmids were tested (see FIG. 17, where the number on the x-axis corresponds to the number in the “ID” column of TABLE 3). Two days post-transfection, a dual luciferase assay (Promega) was run following standard protocols, and luciferase signals were read on a standard plate reader. FIG. 17 shows Renilla luciferase signals normalized to Firefly luciferase signals, and then normalized to a CAG.EGFP control construct. As shown in FIG. 17, some miRNA constructs result in more knockdown of passenger reporter, which suggests that passenger strand is more frequently generated from those microRNA constructs. Constructs that showed greater than 75% signal (less than 25% knockdown) were considered for other experiments described herein.

[0568] A codon-optimized KCNQ4 reporter assay was also used to evaluate miRNA-mediated KCNQ4 knockdown using constructs and compositions described herein (see FIG. 18). HEK cells (seeded at 4×10⁴ cells/well) were transfected with 600 ng of human microRNA plasmid DNA or control CAG.GFP plasmid DNA, and 400 ng of Dual Luciferase KCNQ4 codon-modified reporter DNA. Eleven microRNA plasmids were tested (see FIG. 18, where the number on the x-axis corresponds to the number in the “ID” column of TABLE 3). Two days post-transfection, a dual luciferase assay (Promega) was run following standard protocols, and luciferase signals were read on a standard plate reader. FIG. 18 shows Renilla luciferase signals normalized to Firefly luciferase signals, and then normalized to a CAG.EGFP control plasmid (N=4). Some miR constructs were observed to give more knockdown of the KCNQ4 codon-modified reporter. miR constructs that showed greater than 75% signal (less than 25% knockdown) were considered for other experiments described herein.

[0569] A codon-optimized KCNQ4 30-mer guide reporter assay was also used to evaluate miRNA-mediated KCNQ4 knockdown using constructs and compositions described herein (see FIG. 19). HEK cells (seeded at 4×10⁴ cells/well) were transfected with 600 ng of human microRNA plasmid DNA or control CAG.GFP plasmid DNA, and 400 ng of Dual Luciferase KCNQ4 30-mer reporter DNA. Eleven microRNA plasmids were tested (see FIG. 19, where the number on the x-axis corresponds to the number in the “ID” column of TABLE 3). Two days post-transfection, a dual luciferase assay (Promega) was run following standard protocols, and luciferase signals were read on a standard plate reader. FIG. 19 shows Renilla luciferase signals normalized to Firefly luciferase signals, and then normalized to a CAG.EGFP control plasmid (N=4). As many plasmids have two different microRNAs, each construct was tested against its specific 30-mer reporters to assess the efficacy of knockdown of each microRNA in a given plasmid. Surprisingly, some constructs show one microRNA that is more effective at knockdown than the other microRNA in that same plasmid.

[0570] A codon-optimized KCNQ4 reporter assay was also used to evaluate miRNA-mediated KCNQ4 knockdown using constructs and compositions described herein (see FIG. 20). HEK cells (seeded at 4×10⁴ cells/well) were transfected with 600 ng of mouse microRNA plasmid DNA or control CAG.GFP plasmid DNA, and 400 ng of Dual Luciferase reporter DNA. Three microRNA plasmids were tested (see FIG. 20, where the number on the x-axis corresponds to the number in the “ID” column of TABLE 3). Two days post-transfection, a dual luciferase assay (Promega) was run following standard protocols, and luciferase signals were read on a standard plate reader. FIG. 20 shows Renilla luciferase signals normalized to Firefly luciferase signals, and then normalized to an CAG.EGFP control construct (N=3). Similar knockdown levels between microRNA constructs containing GFP and containing codon-modified KCNQ4 were observed.

[0571] In vitro knockdown of KCNQ4 by miRNA constructs and compositions comprising human KCNQ4 targeting sequences was also evaluated in HEK cells (see FIGS. 21 and 22). HEK cells (seeded at 1.5×10⁵ cells/well) were transfected with 600 ng of human microRNA plasmid DNA or control CAG.GFP plasmid DNA, and 400 ng of human wild-type KCNQ4-mScarlet reporter DNA. Four microRNA constructs were tested (see FIG. 21, N=3). Three days post-transfection, cells were imaged for fluorescence (see FIG. 21, N=3) and then harvested for western blot analysis (FIG. 22, N=3). Reduced KCNQ4-mScarlet signals were observed with the different microRNA constructs compared to the CAG.GFP control construct. Without wishing to be bound to any theory, the present example suggests that miR constructs described herein resulted in microRNA-mediated knockdown of KCNQ4.

[0572] In vitro knockdown of KCNQ4 by miRNA constructs and compositions comprising mouse KCNQ4 targeting sequences were also evaluated in HEK cells (see FIGS. 23 and 24). HEK cells (seeded at 1.5×10⁵ cells/well) were transfected with 600 ng of mouse microRNA plasmid DNA or control CAG.GFP plasmid DNA, and 400 ng of mouse KCNQ4-mScarlet reporter DNA. Three microRNA constructs were tested (see FIG. 23, N=3). Three days post-transfection, cells were imaged for fluorescence (FIG. 23, N=3) and then harvested for western blot analysis (FIG. 24, N=3). Reduced KCNQ4-mScarlet signals were observed with the different microRNA constructs compared to the CAG.GFP control construct. Without wishing to be bound to any theory, the present example suggests that miR constructs described herein resulted in microRNA-mediated knockdown of KCNQ4.

[0573] AAVAnc80-mmumiR KCNQ4 knockdown constructs and compositions comprising mouse KCNQ4 targeting sequences were also evaluated using a KCNQ4 reporter assay (see FIGS. 25 and 26). HEK cells (4×10⁴ cells/well) transduced with AAVAnc80-mmumiR knockdown vectors at three MOIs (1E5 vg/cell, 4E5 vg/cell, and 1E6 vg/cell) or AAVAnc80-CAG.EGFP control vector at three MOIs (1E5 vg/cell, 4E5 vg/cell, and 1E6 vg/cell), then transfected with 400 ng of luciferase reporter plasmid. A dual luciferase assay (Promega) was performed 72 h after transduction via standard protocols. FIG. 25 shows Renilla luciferase signals normalized to Firefly luciferase signals, then normalized to AAVAnc80-CAG.EGFP vector signal. Fluorescence images of cells before dual luciferase assay are shown below their respective histograms (see FIG. 26). A dose-dependent knockdown of dual luciferase KCNQ4 reporter with increasing vector MOI across all vectors was observed.

[0574] Effects on KCNQ4 channel conductance using miRNA constructs and compositions described herein were also evaluated (see FIG. 27). CHO cells stably expressing human KCNQ4 were electroporated with different amounts of human microRNA plasmid DNA (plasmid dose was in μg of DNA). An FLIPR assay was performed by adding flupirtine (KCNQ4 agonist) at none concentrations −0.01, 0.03, 0.1, 0.3, 1, 3, 10, 30, and 100 μM, N=4 wells per concentration. Fluorescence emission was measured via a thallium flux assay (potassium ion surrogate) after flupirtine addition. FIG. 27 shows maximum Relative Light Units (RLU) of different treatment conditions. A dose-dependent knockdown effect with increasing plasmid dose of the microRNA plasmids was observed, indicated by lower RLU from activated KCNQ4 in microRNA-treated cells compared to CAG.GFP treated cells.

[0575] In vitro knockdown of mouse KCNQ4 in HEK cells using mouse AAVAnc80-mmumiR-GFP constructs and compositions described herein was also evaluated (see FIG. 28). HEK cells (1.5×10⁵ cells/well) were transfected with mouse KCNQ4-mScarlet reporter plasmid (“CM” refers to an codon-optimized KCNQ4 sequence), then 24 h later transduced with mouse AAVAnc80-mmumiR-GFP vectors and harvested for Western protein analysis 72 h post-transduction. Expression of codon-modified KCNQ4 protein from the AAVAnc80-mmumiR-KCNQ4CM vectors (lanes 12 and 15) were observed. Importantly, knockdown of mouse KCNQ4 levels after treatment with AAVAnc80-mmumiR-GFP vectors was observed (e.g., comparing lane 3 (control) with lanes 6 and 9).

### Example 3: Generation of a Stable Human Cell Line Expressing WT KCNQ4 and a Loss-of-Function KCNQ4 Variant

[0576] The present example seeks to overcome the problem that HEK293 cells express KCNQ4 at near-undetectable levels when assayed by western blot analysis or quantitative PCR. To address this issue, the present example describes generating a stable human cell line that expresses wild-type KCNQ4 and a loss-of-function KCNQ4 variant. A stable human cell line can be produced by knocking-in (e.g., using CRISPR technology, e.g., obtaining a cell from a patient with a loss-of-function mutation, etc.) wild-type KCNQ4 and a loss-of-function KCNQ4 variant, each with a different detectable (e.g., visualizable) reporter system, such as a reporter system provided by the present disclosure. The wild-type KCNQ4 is either a native, wild-type sequence or a codon-optimized sequence (to resist miRNA-mediated degradation). The engineered human cell line is useful for a variety of purposes, such as, e.g., screening human plasmids and viruses for effective KCNQ4 knockdown, such as those described in the present disclosure. In addition, the engineered human cell line is useful for measuring K+ currents before and after treatment in accordance with the present disclosure.

### Example 4: Knockdown of KCNQ4 in Mice

[0577] The present example describes a KCNQ4 knockdown strategy to improve hearing in mice. Wild-type (+/+), heterozygous (Dn/+), and homozygous (Dn/Dn) groups of mice will each be tested in one of four conditions Theas shown in TABLE 4, and as follows: (1) administering +/+ and Dn/+ mice eGFP and miRNA constructs described herein (Group 1); (2) administering +/+ mice eGFP only (transduction), and Dn/+ and Dn/Dn mice KCNQ and miRNA constructs described herein; (3) administering Dn/+ and Dn/Dn mice KCNQ construct only (for augmented KCNQ expression); and (4) not administering any constructs to mice (negative control). Dn transgenic (hetero and homozygous) mice have been previously described (see Kharkovets et al., Mice with altered KCNQ4+ channels implicate sensory outer hair cells in human progressive deafness, EMBO, 2006; which is incorporated in its entirety herein by reference).

[0578] As one of skill in the art will appreciate, the “Kharkovets et al.,” mice are on a C57BL/6 background, which background harbors a (naturally occurring, spontaneous) point mutation in the Cdh23 gene, which results in age-related hearing loss. The present Example describes studies to be performed in both C57BL/6-based Dn transgenic mice and mice backcrossed onto another background (e.g., FVB), that does not harbor the Cdh23 mutation, such that experiments in older mice would not be confounded by any Cdh23-mediated hearing loss. The miRNA can be delivered using AAV-based constructs comprising AAV2 ITRs and viral particles can be encapsidated with a capsid comprising Anc80.

TABLE 4
KCNQ4 knockdown strategy

| Genotype | Group 1 | Group 2 | Group 3 | Group 4 |
|---|---|---|---|---|
| +/+ | eGFP + | eGFP only | | |
| | microRNA | (transduction) | | |
| Dn/+ | eGFP + | KCNQ4 + | KCNQ4 only | Uninjected |
| | microRNA | microRNA | (augment) | |
| Dn/Dn | | KCNQ4 + | KCNQ4 only | Uninjected |
| | | microRNA | (augment) | |

[0579] In this study, miRNA or control constructs are injected into mice at a particular time point. Outer hair cell (OHC) and histological analyses may be performed 2-4 weeks post injection. Auditory brainstem response (ABR) measurements may be measured beginning at two weeks post-injection and continuing at intervals of between 6-12 weeks. miRNA or control constructs are administered to weanling or juvenile (e.g., P21, P30, P36, etc.) mice or adult (P42, P60, etc.) mice. Here, mice are injected at P21 or P30. A first auditory readout is performed at approximately 3 weeks post injection, using outer hair cell (OHC) recordings and histological analyses. Auditory brainstem response measurements are performed at 12 weeks, 24 weeks, 30 weeks, and 42 weeks of age in the mice injected at P30, and at P50, P112, and P160 days of age in the mice injected at P21.

### Example 5: Replacement and Knockdown of KCNQ4 in HEK Cells

[0580] The present example describes a targeting strategy that knocks out both KCNQ4 alleles and replaces wild-type KCNQ4 with a codon-optimized KCNQ4 using a SaCas9/gRNA strategy FIG. (FIG. 9). The present example also describes an in vitro analysis of KCNQ4 knockdown in HEK cells via Western blot and quantitative PCR.

[0581] FIG. 10 shows a western blot demonstrating that transduction of SaCas9/gRNA in HEK cells significantly reduced KCNQ4. The following guides were transfected with SaCas9 and KCNQ4 DNA to determine knockdown efficiency: sg233Fw (lane 2), sg386Fw (lane 3), sg408Rev (lane 4), sg447Fw(lane 5), sg482Fw (lane 6), and sg490Fw (lane 7). An untransfected control (lane 8), sgVEGF (targeting VEGF) (lane 9), and Beta-Actin expression (lanes 2-9) were used as controls. Based on TIDE, western blot, and immunofluorescence analyses (data not shown), sgRNA 386Fw and sgRNA 408Rev inhibited KNCQ4 expression more than other sgRNAs that were tested. To expand and/or improve upon results obtained thus far, similar experiments can be performed in 3T3 cells using deadCas9 and mouse sgRNA sequences.

[0582] The present example also describes delivery of CRISPR/Cas9 using AAV (AAV-CRISPR). To begin, several constructs can be designed and characterized, in vitro, using TIDE, quantitative and western blot analyses on dual transfected cells to determine extent of DNA and RNA knockdown. The following exemplary constructs can be used: CMV.dCas9; CMV.SaCas9; Hsa KCNQ4codop.U6-386Fw (n=3 in HEK); Hsa KCNQ4codop.U6-408Rev (n=3 in HEK); Mmu KCNQ4codop.U6-386Fw (n=1, then explant); Mmu KCNQ4codop.U6-408Rev (n=1, then explant); Hsa eGFP.U6-386Fw (n=3 in HEK); Hsa eGFP.U6-408Rev (n=3 in HEK); Mmu eGFP.U6-386Fw (n=1, then explant); Mmu eGFP.U6-408Rev (n=1, then explant). Separately, a dCas9.U6 gRNA (human) is designed and characterized, and analyzed using the same methods.

[0583] An Anc80-based construct can be used for sgRNA constructs. The AAV-CRISPR construct efficiency is tested in wild-type mouse cochlear explants, human cells, or HEK cells using an eGFP virus to determine knockdown of endogenous KCNQ4 without replacement. Knockdown of KCNQ4 is evaluated using various assays such as, e.g., IHC, quantitative, and/or western blot analyses. AAV2 capsids can also be tested.

[0584] The present example also describes mouse AAV-CRISPR experiments (N=24). At 21 and 30 days post-delivery of AAV-CRISPR, mice are sacrificed and analyses (e.g., IHC analyses) for deadCas9, Myo7a (in both inner and outer hair cells) and KCNQ4 can be performed

### Example 6: Treatment of KCNQ4—Mediated Hearing Loss

[0585] The present example describes a targeting strategy that knocks out both KCNQ4 alleles to eliminate any KCNQ4 variants and simultaneously or sequentially administers a composition encoding a codon-optimized KCNQ4. This knockdown is achieved using an miRNA or SaCas9/gRNA strategy. The present example also uses, either as a pre-treatment or quality control assay, an in vitro assay of KCNQ4 knockdown in HEK cells via Western blot and quantitative PCR to determine efficacy of approach.

[0586] The compositions are administered to a subject with at least one identified loss-of-function KCNQ4 variant gene. The genomic KCNQ4 genes in the subject are suppressed and expression of the administered, codon-optimized wild type KCNQ4 is achieved. Prior to and post-administration, hearing tests may be performed (e.g., ABRs, DPOAEs).

[0587] An Anc80-based or AAV2-based particle can be used to deliver all constructs (e.g., miRNA, CRISPR/Cas9, exogenous codon-optimized KCNQ4).

### Example 7: Device Description for Suitable Delivery of Compositions to the Inner Ear

[0588] This example relates to a device suitable for the delivery of rAAV particles to the inner ear. A composition comprising rAAV particles is delivered to the cochlea of a subject using a specialized microcatheter designed for consistent and safe penetration of the round window membrane (RWM). The microcatheter is shaped such that the surgeon performing the delivery procedure can enter the middle ear cavity via the external auditory canal and contact the end of the microcatheter with the RWM. The distal end of the microcatheter may include at least one microneedle with a diameter from about 10 microns to about 1,000 microns, which produces perforations in the RWM that are sufficient to allow rAAV particles as described (e.g., comprising an rAAV construct of the present disclosure) to enter the cochlear perilymph of the scala tympani at a rate which does not damage the inner ear (e.g., a physiologically acceptable rate, e.g., a rate of approximately 30 μL/min to approximately 90 μL/min),) but small enough to heal without surgical repair. The remaining portion of the microcatheter, proximal to the microneedle(s), is loaded with the AAV particles/artificial perilymph formulation at at a defined titer (e.g., approximately 1×10¹² to 5×10¹³ vg/mL).) The proximal end of the microcatheter is connected to a micromanipulator that allows for precise, low volume infusions of approximately 30 μL to approximately 100 μL.

### Example 8: Human Clinical Example

[0589] A patient is diagnosed as having a loss-of-function KCNQ4 gene variant. Inhibitory nucleic acids are designed to target the loss-of-function KCNQ4 gene variant. The patient is put under general anesthesia. The surgeon approaches the tympanic membrane from external auditory canal, makes a small incision at the inferior edge of the external auditory canal where it meets the tympani membrane, and lifts the tympanic membrane as a flap to expose the middle ear space. A surgical laser is used to make a small opening (approximately 2 mm) in the stapes footplate. The surgeon then penetrates the round window membrane with a microcatheter loaded with a solution of a mixture of AAV-based constructs each comprising inhibitory nucleic acids to KCNQ4 or exogenous, codon-optimized KCNQ4, prepared in artificial perilymph at a titer of 1e13 vg/mL. The microcatheter is connected to a micromanipulator that infuses approximately 20 uL of the mixture at a rate of approximately 1 uL/min. At the conclusion of the infusion, the surgeon withdraws the microcatheter and patches the holes in the stapes foot plate and RWM with a gel foam patch. The procedure concludes with replacement of the tympanic membrane flap before the patient is allowed to withdraw and recover from the anesthesia.

### Example 9: Non-Invasive Prenatal Testing of Maternal Blood to Detect a KCNQ4 Mutation

[0590] Maternal blood samples (20-40 mL) are collected into Cell-free DNA tubes. At least 7 mL of plasma is isolated from each sample via a double centrifugation protocol of 2,000 g for 20 minutes, followed by 3,220 g for 30 minutes, with supernatant transfer following the first spin. cfDNA is isolated from 7-20 mL plasma using a QIAGEN QIAmp Circulating Nuclei Acid kit and eluted in 45 μL TE buffer. Pure maternal genomic DNA is isolated from the buffy coat obtained following the first centrifugation.

[0591] By combining thermodynamic modeling of the assays to select probes with minimized likelihood of probe-probe interaction with amplification approaches described previously (Stiller et al. 2009 Genome Res 19(10):1843-1848, which is incorporated herein in its entirety), multiplexing of 11,000 assays can be achieved. Maternal cfDNA and maternal genomic DNA samples are pre-amplified for 15 cycles using 11,000 target-specific assays and an aliquot is transferred to a second PCR reaction of 15 cycles using nested primers. Samples are prepared for sequencing by adding barcoded tags in a third 12-cycle round of PCR. The targets include SNPs corresponding to the greater than 30 mutations in KCNQ4 known to lead to KCNQ4 loss-of-function and/or sequences that cover all exons of KCNQ4, in order to detect any presently unknown but potentially pathogenic (e.g., loss-of-function) variant. The amplicons are then sequenced using an Illumina HiSeq sequencer. Genome sequence alignment is performed using commercially available software.

### EMBODIMENTS

[0592] Embodiment 1. A construct comprising a coding sequence operably linked to a promoter, wherein the coding sequence encodes a Kv7.4 protein.

[0593] Embodiment 2. The construct of embodiment 1, wherein the coding sequence is a KCNQ4 gene.

[0594] Embodiment 3. The construct of embodiment 2, wherein the KCNQ4 gene is a primate KCNQ4 gene.

[0595] Embodiment 4. The construct of embodiment 2 or 3, wherein the KCNQ4 gene is a human KCNQ4 gene.

[0596] Embodiment 5. The construct of embodiment 4, wherein the human KCNQ4 gene comprises a nucleic acid sequence according to SEQ ID NO: 1, SEQ ID NO: 2, SEQ ID NO: 3, SEQ ID NO: 4, SEQ ID NO: 5, SEQ ID NO: 6, SEQ ID NO: 7, SEQ ID NO: 8, SEQ ID NO: 9, SEQ ID NO: 10, SEQ ID NO: 25, SEQ ID NO: 26, SEQ ID NO: 27, SEQ ID NO: 28, SEQ ID NO: 29, SEQ ID NO: 30 or SEQ ID NO: 90.

[0597] Embodiment 6. The construct of embodiment 4 or 5, wherein the human KCNQ4 gene comprises a nucleic acid sequence according to SEQ ID NO: 9 or 10.

[0598] Embodiment 7. The construct of embodiment 1, wherein the Kv7.4 protein is a primate Kv7.4 protein.

[0599] Embodiment 8. The construct of embodiment 1 or 7, wherein the Kv7.4 protein is a human Kv7.4 protein.

[0600] Embodiment 9. The construct of embodiment 8, wherein the Kv7.4 protein comprises an amino acid sequence according to SEQ ID NO: 11, SEQ ID NO: 12, or SEQ ID NO: 13.

[0601] Embodiment 10. The construct of any one of claims 1-9, wherein the promoter is an inducible promoter, a constitutive promoter, or a tissue-specific promoter.

[0602] Embodiment 11. The construct of any one of embodiments 1-10, wherein the promotor is a cochlear hair cell-specific promoter.

[0603] Embodiment 12. The construct of embodiment 11, wherein the cochlear hair cell-specific promoter is a ATOH1 promoter, a POU4F3 promoter, a LHX3 promoter, a MYO7A promoter, a MYO6 promoter, a α9ACHR promoter, or a α10ACHR promoter.

[0604] Embodiment 13. The construct of any one of embodiments 1-10, wherein the promoter is a CAG promoter, a CBA promoter, an smCBA promoter, a CMV promoter, or a CB7 promoter.

[0605] Embodiment 14. The construct of embodiment 13, wherein the promoter comprises a nucleic acid sequence according to SEQ ID NO: 22, SEQ ID NO: 23, SEQ ID NO: 24, SEQ ID NO: 297, SEQ ID NO: 298, SEQ ID NO: 299, SEQ ID NO: 300, SEQ ID NO: 301, SEQ ID NO: 302, SEQ ID NO: 303, SEQ ID NO: 304, SEQ ID NO: 305, SEQ ID NO: 306, SEQ ID NO: 307, SEQ ID NO: 308, SEQ ID NO: 309, and/or SEQ ID NO: 310.

[0606] Embodiment 15. The construct of any one of embodiments 1-14, further comprising two AAV inverted terminal repeats (ITRs), wherein the two AAV ITRs flank the coding sequence and promoter.

[0607] Embodiment 16. The construct of embodiment 15, wherein the two AAV ITRs are or are derived from AAV2 ITRs.

[0608] Embodiment 17. The construct of embodiment 15, wherein the two AAV ITRs comprise: (i) a 5′ ITR comprising a nucleic acid sequence according to SEQ ID NO: 15 and a 3′ ITR comprising a nucleic acid sequence according to SEQ ID NO: 16; or (ii) a 5′ ITR comprising a nucleic acid sequence according to SEQ ID NO: 19 and a 3′ ITR comprising a nucleic acid sequence according to SEQ ID NO: 20.

[0609] Embodiment 18. The construct of embodiment 1, wherein the construct comprises a nucleic acid sequence according to SEQ ID NO: 1, SEQ ID NO: 2, SEQ ID NO: 3, SEQ ID NO: 4, SEQ ID NO: 5, SEQ ID NO: 6, SEQ ID NO: 7, SEQ ID NO: 8, SEQ ID NO: 9, SEQ ID NO: 10, SEQ ID NO: 25, SEQ ID NO: 26, SEQ ID NO: 27, SEQ ID NO: 28, SEQ ID NO: 29, SEQ ID NO: 30, SEQ ID NO: 90, or SEQ ID NO: 91.

[0610] Embodiment 19. The construct of embodiment 1, wherein the construct comprises a nucleic acid sequence according to one or more of SEQ ID NOs: 1-41 and/or 42-70 and/or 96-97.

[0611] Embodiment 20. A construct comprising a coding sequence operably linked to a promoter, wherein the coding sequence encodes a KCNQ4 inhibitory nucleic acid, which comprises a nucleotide sequence complementary to a KCNQ4 gene.

[0612] Embodiment 21. The construct of embodiment 20, wherein the KCNQ4 inhibitory nucleic acid is an miRNA, an siRNA, or shRNA.

[0613] Embodiment 22. The construct of embodiment 20 or 21, wherein the KCNQ4 inhibitory RNA comprises a sequence according to SEQ ID NO: 42, SEQ ID NO: 43, SEQ ID NO: 44, SEQ ID NO: 45, SEQ ID NO: 46, SEQ ID NO: 47, SEQ ID NO: 48, SEQ ID NO: 49, SEQ ID NO: 50, SEQ ID NO: 51, SEQ ID NO: 52, SEQ ID NO: 53, SEQ ID NO: 54, SEQ ID NO: 55, SEQ ID NO: 56, SEQ ID NO: 57, SEQ ID NO: 58, SEQ ID NO: 59, SEQ ID NO: 60, SEQ ID NO: 61, SEQ ID NO: 62, SEQ ID NO:63, SEQ ID NO: 64, SEQ ID NO: 65, SEQ ID NO: 66, SEQ ID NO: 67, SEQ ID NO: 68, SEQ ID NO: 69, SEQ ID NO: 70, SEQ ID NO: 96, or SEQ ID NO: 97.

[0614] Embodiment 23. The construct of embodiment 20, wherein the KCNQ4 inhibitory RNA is a gRNA.

[0615] Embodiment 24. The construct of embodiment 20 or 23, wherein the KCNQ4 inhibitory RNA comprises a sequence according to SEQ ID NO: 42, SEQ ID NO: 43, SEQ ID NO: 44, SEQ ID NO: 45, SEQ ID NO: 46, SEQ ID NO: 47, SEQ ID NO: 48.

[0616] Embodiment 25. The construct of embodiment 20, wherein the KCNQ4 gene is a primate KCNQ4 gene.

[0617] Embodiment 26. The construct of embodiment 20 or 25, wherein the KCNQ4 gene is a human KCNQ4 gene.

[0618] Embodiment 27. The construct of embodiment 26, wherein the human KCNQ4 gene comprises a nucleic acid sequence according to SEQ ID NO: 1, SEQ ID NO: 2, SEQ ID NO: 3, SEQ ID NO: 4, SEQ ID NO: 5, SEQ ID NO: 6, SEQ ID NO: 7, SEQ ID NO: 8, SEQ ID NO: 9, SEQ ID NO: 10, SEQ ID NO: 25, SEQ ID NO: 26, SEQ ID NO: 27, SEQ ID NO: 28, SEQ ID NO: 29, SEQ ID NO: 30 or SEQ ID NO: 90.

[0619] Embodiment 28. The construct of any one of claims 20-27, wherein the promoter is an inducible promoter, a constitutive promoter, or a tissue-specific promoter.

[0620] Embodiment 29. The construct of any one of embodiments 20-28, wherein the promotor is a cochlear hair cell-specific promoter.

[0621] Embodiment 30. The construct of embodiment 29, wherein the cochlear hair cell-specific promoter is a ATOH1 promoter, a POU4F3 promoter, a LHX3 promoter, a MYO7A promoter, a MYO6 promoter, a α9ACHR promoter, or a α10ACHR promoter.

[0622] Embodiment 31. The construct of any one of embodiments 20-28, wherein the promoter is an H1 or U6 promoter.

[0623] Embodiment 32. The construct of embodiment 31, wherein the promoter comprises a nucleic acid sequence according to SEQ ID NO: 22, SEQ ID NO: 23, SEQ ID NO: 24, SEQ ID NO: 297, SEQ ID NO: 298, SEQ ID NO: 299, SEQ ID NO: 300, SEQ ID NO: 301, SEQ ID NO: 302, SEQ ID NO: 303, SEQ ID NO: 304, SEQ ID NO: 305, SEQ ID NO: 306, SEQ ID NO: 307, SEQ ID NO: 308, SEQ ID NO: 309, and/or SEQ ID NO: 310.

[0624] Embodiment 33. The construct of any one of embodiments 20-32, further comprising two AAV inverted terminal repeats (ITRs), wherein the two AAV ITRs flank the coding sequence and promoter.

[0625] Embodiment 34. The construct of embodiment 33, wherein the two AAV ITRs are or are derived from AAV2 ITRs.

[0626] Embodiment 35. The construct of embodiment 33, wherein the two AAV ITRs comprise: (i) a 5′ ITR comprising a nucleic acid sequence according to SEQ ID NO: 15 and a 3′ ITR comprising a nucleic acid sequence according to SEQ ID NO: 16; or (ii) a 5′ ITR comprising a nucleic acid sequence according to SEQ ID NO: 19 and a 3′ ITR comprising a nucleic acid sequence according to SEQ ID NO: 20.

[0627] Embodiment 36. The construct of embodiment 1, wherein the construct comprises a nucleic acid sequence according to any of SEQ ID NOs: 1-10.

[0628] Embodiment 37. The construct of embodiment 1, wherein the construct comprises a nucleic acid sequence according to any of SEQ ID NOs: 25-30 or 90-91.

[0629] Embodiment 38. An AAV particle comprising the construct of any one of embodiments 1-19.

[0630] Embodiment 39. An AAV particle comprising the construct of any one of embodiments 20-37.

[0631] Embodiment 40. The AAV particle of embodiment 38 or 39, further comprising an AAV capsid, wherein the AAV capsid is or is derived from an AAV2, AAV3, AAV4, AAV5, AAV6, AAV7, AAV8, AAV9, AAV10, AAV-rh8, AAV-rh10, AAV-rh39, AAV-rh43 or AAV Anc80 capsid.

[0632] Embodiment 41. The AAV particle of embodiment 40, wherein the AAV capsid is an AAV Anc80 capsid.

[0633] Embodiment 42. A composition comprising: (i) the construct of any one of embodiments 1-19; (ii) the construct of any one of embodiments 20-37; or (iii) a combination thereof.

[0634] Embodiment 43. A composition comprising the AAV particle of any one of embodiments 38-41.

[0635] Embodiment 44. A composition comprising: (i) the AAV particle of embodiment 38; (ii) the AAV particle of embodiment 39; or (iii) a combination thereof.

[0636] Embodiment 45. The composition of embodiment 44, wherein the AAV particle of (i), (ii), or both further comprise an AAV capsid, wherein the AAV capsid is or is derived from an AAV2, AAV3, AAV4, AAV5, AAV6, AAV7, AAV8, AAV9, AAV10, AAV-rh8, AAV-rh10, AAV-rh39, AAV-rh43 or AAV Anc80 capsid.

[0637] Embodiment 46. The composition of embodiment 44, wherein the AAV capsid of the AAV particle of (i), (ii), or both is an AAV Anc80 capsid.

[0638] Embodiment 47. The composition of any one of embodiments 42-46, wherein the composition is a pharmaceutical composition.

[0639] Embodiment 48. The composition of embodiment 47, further comprising a pharmaceutically acceptable carrier.

[0640] Embodiment 49. A cell comprising the composition of any one of embodiments 42-48.

[0641] Embodiment 50. The cell of embodiment 49, wherein the cell is in vivo, ex vivo, or in vitro.

[0642] Embodiment 51. The cell of embodiment 49 or 50, wherein the cell is a mammalian cell.

[0643] Embodiment 52. The cell of embodiment 51, wherein the mammalian cell is a human cell.

[0644] Embodiment 53. The cell of embodiment 52, wherein the cell is immortalized to generate a stable cell line.

[0645] Embodiment 54. The cell of embodiment 52, wherein the human cell is in the ear of a subject.

[0646] Embodiment 55. The cell of embodiment 52, wherein at least one copy of an endogenous KCNQ4 gene has at least one sequence variation.

[0647] Embodiment 56. The cell of embodiment 55, wherein the at least one sequence variation results in a loss-of-function gene product.

[0648] Embodiment 57. A system comprising the composition of any one of embodiments 42-48.

[0649] Embodiment 58. A method comprising contacting an inner ear cell with the composition of any one of embodiments 42-48.

[0650] Embodiment 59. The method of embodiment 58, where the inner ear cell is an outer hair cell.

[0651] Embodiment 60. The method of embodiment 58 or 59, wherein the inner ear cell is in the ear of a subject.

[0652] Embodiment 61. The method of embodiment 58 or 59, wherein the inner ear cell is in vitro or ex vivo.

[0653] Embodiment 62. A method comprising, contacting a cell with: (i) the construct of any one of embodiments 1-38; and (ii) one or more plasmids comprising an AAV Rep gene, AAV Cap gene, AAV VA gene, AAV E2a gene, and AAV E4 gene.

[0654] Embodiment 63. The method of embodiment 62, where the cell is an inner ear cell.

[0655] Embodiment 64. The method of embodiment 63, wherein the inner ear cell is outer hair cell.

[0656] Embodiment 65. The method of embodiment 63, wherein the inner ear cell is in the ear of a subject.

[0657] Embodiment 66. The method of embodiment 58 or 59, wherein the inner ear cell is in vitro or ex vivo.

[0658] Embodiment 67. A method comprising introducing the composition of any one of embodiments 42-48 into the inner ear of a subject.

[0659] Embodiment 68. The method of embodiment 67, wherein the composition is introduced into the cochlea of the subject.

[0660] Embodiment 69. The method of embodiment 67 or 68, wherein the composition is introduced via a round window membrane injection.

[0661] Embodiment 70. The method of any one of embodiments 60, 65, or 67-69, further comprising measuring a hearing level of the subject.

[0662] Embodiment 71. The method of embodiment 70, a hearing level is measured by performing an auditory brainstem response (ABR) test.

[0663] Embodiment 72. The method of embodiment 70 or 71, further comprising comparing the hearing level of the subject to a reference hearing level.

[0664] Embodiment 73. The method of embodiment 72, wherein the reference hearing level is a published or historical reference hearing level.

[0665] Embodiment 74. The method of embodiment 73, wherein the hearing level of the subject is measured after the construct of any one of embodiments 1-19 is introduced, and the reference hearing level is a hearing level of the subject that was measured before the construct of any one of embodiments 1-19 was introduced.

[0666] Embodiment 75. The method of any one of embodiments 58-74, further comprising measuring a level of a KCNQ4 gene product in a subject.

[0667] Embodiment 76. The method of embodiment 75, wherein the level of the KCNQ4 gene product is measured in the inner ear of the subject.

[0668] Embodiment 77. The method of embodiment 75, wherein the level of the KCNQ4 gene product is measured in the cochlea of the subject.

[0669] Embodiment 78. The method of any one of embodiments 58-77, further comprising comparing the level of a KCNQ4 gene product in the subject to a reference KCNQ4 gene product level.

[0670] Embodiment 79. The method of embodiment 78, wherein the reference hearing level is a published or historical reference KCNQ4 gene product level.

[0671] Embodiment 80. The method of embodiment 75, wherein the level of a KCNQ4 gene product in the subject is measured after the construct of any one of embodiments 1-37 is introduced, and the reference KCNQ4 gene product level is a KCNQ4 gene product level of the subject that was measured before the composition of any one of embodiments 1-37 was introduced.

[0672] Embodiment 81. A method of treating hearing loss comprising administering the composition of any one of embodiments 42-48 to a subject in need thereof.

[0673] Embodiment 82. A method of treating hearing loss comprising administering a particle of any one of embodiments 38-41 to a subject in need thereof.

[0674] Embodiment 83. A construct of any one of embodiments 1-37 for use in the treatment of hearing loss.

[0675] Embodiment 84. A composition of any one of embodiments 42-48 for use in the treatment of hearing loss.

[0676] Embodiment 85. A particle of any one of embodiments 38-41 for use in the treatment of hearing loss.

[0677] Embodiment 86. Use of a construct of any one of embodiments 1-37 for the manufacture of a medicament to treat hearing loss.

[0678] Embodiment 87. Use of a composition of any one of embodiments 42-48 for the manufacture of a medicament to treat hearing loss.

[0679] Embodiment 88. Use of a particle of any one of embodiments 38-41 for the manufacture of a medicament to treat hearing loss.

[0680] Embodiment 89. A cell comprising a coding sequence operably linked to a promoter, wherein the coding sequence encodes a Kv7.4 protein.

[0681] Embodiment 90. A cell comprising a coding sequence operably linked to a promoter, wherein the coding sequence encodes a loss-of-function KCNQ4 variant gene product.

[0682] Embodiment 91. A population of cells comprising one or more cells according to embodiment 89, wherein the population is or comprises a stable cell line.

[0683] Embodiment 92. The method of any one of embodiments 75-80, wherein the KCNQ4 gene product is a Kv7.4 protein.

[0684] Embodiment 93. A construct comprising an inhibitory nucleic acid, wherein the inhibitory nucleic acid is or comprises one or more of miR1-155; miR2-155; miR4-155; miR5-155; miR6-155; miR7-155 miR1-16; miR1-26; miR1-96; miR1-122; miR1-135; miR1-182; miR1-183; miR1-335; miR1-451.

[0685] Embodiment 94. An miRNA selected from the group consisting of miR1-155; miR2-155; miR4-155; miR5-155; miR6-155; miR7-155; miR1-16; miR1-26; miR1-96; miR1-122; miR1-135; miR1-182; miR1-183; miR1-335; miR1-451 and combinations thereof.

[0686] Embodiment 95. A kit comprising a composition of any one of embodiments 1-94.

[0687] Embodiment 96. The kit of embodiment 95, wherein the composition is pre-loaded in a device.

[0688] Embodiment 97. The kit of embodiment 96, wherein the device is a microcatheter.

[0689] Embodiment 98. The kit of embodiment 97, wherein the microcatheter is shaped such that it can enter the middle ear cavity via the external auditory canal and contact the end of the microcatheter with the RWM.

[0690] Embodiment 99. The kit of embodiment 97 or 98, wherein a distal end of the microcatheter is comprised of at least one microneedle with diameter of between 10 and 1,000 microns.

[0691] Embodiment 100. The kit of any one of embodiments 95-99, further comprising a device.

[0692] Embodiment 101. The kit of embodiment 100, wherein the device is a device described in FIGS. 32-35 or a device as described herein.

[0693] Embodiment 102. The kit of embodiment 101, wherein the device comprises a needle comprising a bent portion and an angled tip.

### EQUIVALENTS

[0694] It is to be understood that the words which have been used are words of description rather than limitation, and that changes may be made within the purview of the appended claims without departing from the true scope and spirit of the invention in its broader aspects.

[0695] While the present invention has been described at some length and with some particularity with respect to the several described embodiments, it is not intended that it should be limited to any such particulars or embodiments or any particular embodiment, but it is to be construed with references to the appended claims so as to provide the broadest possible interpretation of such claims in view of the prior art and, therefore, to effectively encompass the intended scope of the invention.

[0696] It is to be understood that while the disclosure has been described in conjunction with the detailed description thereof, the foregoing description is intended to illustrate and not limit the scope of the present disclosure, which is defined by the scope of the appended claims. Other aspects, advantages, and modifications are within the scope of the following claims.

[0697] All publications, patent applications, patents, and other references mentioned herein are incorporated by reference in their entirety. In case of conflict, the present specification, including definitions, will control. In addition, section headings, the materials, methods, and examples are illustrative only and not intended to be limiting.

1. A construct comprising a coding sequence operably linked to a promoter, wherein the coding sequence encodes a Kv7.4 protein.

2. The construct of claim 1, wherein the coding sequence is a KCNQ4 gene.

3. The construct of claim 2, wherein the KCNQ4 gene is a primate KCNQ4 gene.

4. The construct of claim 2 or 3, wherein the KCNQ4 gene is a human KCNQ4 gene.

5. The construct of claim 4, wherein the human KCNQ4 gene comprises a nucleic acid sequence according to SEQ ID NO: 1, SEQ ID NO: 2, SEQ ID NO: 3, SEQ ID NO: 4, SEQ ID NO: 5, SEQ ID NO: 6, SEQ ID NO: 7, SEQ ID NO: 8, SEQ ID NO: 9, SEQ ID NO: 10, SEQ ID NO: 25, SEQ ID NO: 26, SEQ ID NO: 27, SEQ ID NO: 28, SEQ ID NO: 29, SEQ ID NO: 30 or SEQ ID NO: 90.

6. The construct of claim 4 or 5, wherein the human KCNQ4 gene comprises a nucleic acid sequence according to SEQ ID NO: 9 or 10.

7. The construct of claim 1, wherein the Kv7.4 protein is a primate Kv7.4 protein.

8. The construct of claim 1 or 7, wherein the Kv7.4 protein is a human Kv7.4 protein.

9. The construct of claim 8, wherein the Kv7.4 protein comprises an amino acid sequence according to SEQ ID NO: 11, SEQ ID NO:12, or SEQ ID NO:13.

10. The construct of any one of claims 1-9, wherein the promoter is an inducible promoter, a constitutive promoter, or a tissue-specific promoter.

11. The construct of any one of claims 1-10, wherein the promotor is a cochlear hair cell-specific promoter.

12. The construct of claim 11, wherein the cochlear hair cell-specific promoter is a ATOH1 promoter, a POU4F3 promoter, a LHX3 promoter, a MYO7A promoter, a MYO6 promoter, a α9ACHR promoter, or a α10ACHR promoter.

13. The construct of any one of claims 1-10, wherein the promoter is a CAG promoter, a CBA promoter, an smCBA promoter, a CMV promoter, or a CB7 promoter.

14. The construct of claim 13, wherein the promoter comprises a nucleic acid sequence according to SEQ ID NO: 22, SEQ ID NO: 23, SEQ ID NO: 24, SEQ ID NO: 297, SEQ ID NO: 298, SEQ ID NO: 299, SEQ ID NO: 300, SEQ ID NO: 301, SEQ ID NO: 302, SEQ ID NO: 303, SEQ ID NO: 304, SEQ ID NO: 305, SEQ ID NO: 306, SEQ ID NO: 307, SEQ ID NO: 308, SEQ ID NO: 309, and/or SEQ ID NO: 310.

15. The construct of any one of claims 1-14, further comprising two AAV inverted terminal repeats (ITRs), wherein the two AAV ITRs flank the coding sequence and promoter.

16. The construct of claim 15, wherein the two AAV ITRs are or are derived from AAV2 ITRs.

17. The construct of claim 15, wherein the two AAV ITRs comprise:
(i) a 5′ ITR comprising a nucleic acid sequence according to SEQ ID NO: 15 and a 3′ ITR comprising a nucleic acid sequence according to SEQ ID NO: 16; or
(ii) a 5′ ITR comprising a nucleic acid sequence according to SEQ ID NO: 19 and a 3′ ITR comprising a nucleic acid sequence according to SEQ ID NO: 20.

18. The construct of claim 1, wherein the construct comprises a nucleic acid sequence according to SEQ ID NO: 1, SEQ ID NO: 2, SEQ ID NO: 3, SEQ ID NO: 4, SEQ ID NO: 5, SEQ ID NO: 6, SEQ ID NO: 7, SEQ ID NO: 8, SEQ ID NO: 9, SEQ ID NO: 10, SEQ ID NO: 25, SEQ ID NO: 26, SEQ ID NO: 27, SEQ ID NO: 28, SEQ ID NO: 29, SEQ ID NO: 30, SEQ ID NO: 90, or SEQ ID NO: 91.

19. The construct of claim 1, wherein the construct comprises a nucleic acid sequence according to one or more of SEQ ID NOs: 1-41 and/or 42-70 and/or 96-97.

20. A construct comprising a coding sequence operably linked to a promoter, wherein the coding sequence encodes a KCNQ4 inhibitory nucleic acid, which comprises a nucleotide sequence complementary to a KCNQ4 gene.

21. The construct of claim 20, wherein the KCNQ4 inhibitory nucleic acid is an miRNA, an siRNA, or shRNA.

22. The construct of claim 20 or 21, wherein the KCNQ4 inhibitory RNA comprises a sequence according to SEQ ID NO: 42, SEQ ID NO: 43, SEQ ID NO: 44, SEQ ID NO: 45, SEQ ID NO: 46, SEQ ID NO: 47, SEQ ID NO: 48, SEQ ID NO: 49, SEQ ID NO: 50, SEQ ID NO: 51, SEQ ID NO: 52, SEQ ID NO: 53, SEQ ID NO: 54, SEQ ID NO: 55, SEQ ID NO: 56, SEQ ID NO: 57, SEQ ID NO: 58, SEQ ID NO: 59, SEQ ID NO: 60, SEQ ID NO: 61, SEQ ID NO: 62, SEQ ID NO:63, SEQ ID NO: 64, SEQ ID NO: 65, SEQ ID NO: 66, SEQ ID NO: 67, SEQ ID NO: 68, SEQ ID NO: 69, SEQ ID NO: 70, SEQ ID NO: 96, or SEQ ID NO: 97.

23. The construct of claim 20, wherein the KCNQ4 inhibitory RNA is a gRNA.

24. The construct of claim 20 or 23, wherein the KCNQ4 inhibitory RNA comprises a sequence according to SEQ ID NO: 42, SEQ ID NO: 43, SEQ ID NO: 44, SEQ ID NO: 45, SEQ ID NO: 46, SEQ ID NO: 47, SEQ ID NO: 48.

25. The construct of claim 20, wherein the KCNQ4 gene is a primate KCNQ4 gene.

26. The construct of claim 20 or 25, wherein the KCNQ4 gene is a human KCNQ4 gene.

27. The construct of claim 26, wherein the human KCNQ4 gene comprises a nucleic acid sequence according to SEQ ID NO: 1, SEQ ID NO: 2, SEQ ID NO: 3, SEQ ID NO: 4, SEQ ID NO: 5, SEQ ID NO: 6, SEQ ID NO: 7, SEQ ID NO: 8, SEQ ID NO: 9, SEQ ID NO: 10, SEQ ID NO: 25, SEQ ID NO: 26, SEQ ID NO: 27, SEQ ID NO: 28, SEQ ID NO: 29, SEQ ID NO: 30 or SEQ ID NO: 90.

28. The construct of any one of claims 20-27, wherein the promoter is an inducible promoter, a constitutive promoter, or a tissue-specific promoter.

29. The construct of any one of claims 20-28, wherein the promotor is a cochlear hair cell-specific promoter.

30. The construct of claim 29, wherein the cochlear hair cell-specific promoter is a ATOH1 promoter, a POU4F3 promoter, a LHX3 promoter, a MYO7A promoter, a MYO6 promoter, a α9ACHR promoter, or a α10ACHR promoter.

31. The construct of any one of claims 20-28, wherein the promoter is an H1 or U6 promoter.

32. The construct of claim 31, wherein the promoter comprises a nucleic acid sequence according to SEQ ID NO: 22, SEQ ID NO: 23, SEQ ID NO: 24, SEQ ID NO: 297, SEQ ID NO: 298, SEQ ID NO: 299, SEQ ID NO: 300, SEQ ID NO: 301, SEQ ID NO: 302, SEQ ID NO: 303, SEQ ID NO: 304, SEQ ID NO: 305, SEQ ID NO: 306, SEQ ID NO: 307, SEQ ID NO: 308, SEQ ID NO: 309, and/or SEQ ID NO: 310.

33. The construct of any one of claims 20-32, further comprising two AAV inverted terminal repeats (ITRs), wherein the two AAV ITRs flank the coding sequence and promoter.

34. The construct of claim 33, wherein the two AAV ITRs are or are derived from AAV2 ITRs.

35. The construct of claim 33, wherein the two AAV ITRs comprise:
(i) a 5′ ITR comprising a nucleic acid sequence according to SEQ ID NO: 15 and a 3′ ITR comprising a nucleic acid sequence according to SEQ ID NO: 16; or
(ii) a 5′ ITR comprising a nucleic acid sequence according to SEQ ID NO: 19 and a 3′ ITR comprising a nucleic acid sequence according to SEQ ID NO: 20.

36. The construct of claim 1, wherein the construct comprises a nucleic acid sequence according to any of SEQ ID NOs: 1-10.

37. The construct of claim 1, wherein the construct comprises a nucleic acid sequence according to any of SEQ ID NOs: 25-30 or 90-91.

38. An AAV particle comprising the construct of any one of claims 1-19.

39. An AAV particle comprising the construct of any one of claims 20-37.

40. The AAV particle of claim 38 or 39, further comprising an AAV capsid, wherein the AAV capsid is or is derived from an AAV2, AAV3, AAV4, AAV5, AAV6, AAV7, AAV8, AAV9, AAV10, AAV-rh8, AAV-rh10, AAV-rh39, AAV-rh43 or AAV Anc80 capsid.

41. The AAV particle of claim 40, wherein the AAV capsid is an AAV Anc80 capsid.

42. A composition comprising:
(i) the construct of any one of claims 1-19;
(ii) the construct of any one of claims 20-37; or
(iii) a combination thereof.

43. A composition comprising the AAV particle of any one of claims 38-41.

44. A composition comprising:
(i) the AAV particle of claim 38;
(ii) the AAV particle of claim 39; or
(iii) a combination thereof.

45. The composition of claim 44, wherein the AAV particle of (i), (ii), or both further comprise an AAV capsid, wherein the AAV capsid is or is derived from an AAV2, AAV3, AAV4, AAV5, AAV6, AAV7, AAV8, AAV9, AAV10, AAV-rh8, AAV-rh10, AAV-rh39, AAV-rh43 or AAV Anc80 capsid.

46. The composition of claim 44, wherein the AAV capsid of the AAV particle of (i), (ii), or both is an AAV Anc80 capsid.

47. The composition of any one of claims 42-46, wherein the composition is a pharmaceutical composition.

48. The composition of claim 47, further comprising a pharmaceutically acceptable carrier.

49. A cell comprising the composition of any one of claims 42-48.

50. The cell of claim 49, wherein the cell is in vivo, ex vivo, or in vitro.

51. The cell of claim 49 or 50, wherein the cell is a mammalian cell.

52. The cell of claim 51, wherein the mammalian cell is a human cell.

53. The cell of claim 52, wherein the cell is immortalized to generate a stable cell line.

54. The cell of claim 52, wherein the human cell is in the ear of a subject.

55. The cell of claim 52, wherein at least one copy of an endogenous KCNQ4 gene has at least one sequence variation.

56. The cell of claim 55, wherein the at least one sequence variation results in a loss-of-function gene product.

57. A system comprising the composition of any one of claims 42-48.

58. A method comprising contacting an inner ear cell with the composition of any one of claims 42-48.

59. The method of claim 58, where the inner ear cell is an outer hair cell.

60. The method of claim 58 or 59, wherein the inner ear cell is in the ear of a subject.

61. The method of claim 58 or 59, wherein the inner ear cell is in vitro or ex vivo.

62. A method comprising, contacting a cell with:
(i) the construct of any one of claims 1-38; and
(ii) one or more plasmids comprising an AAV Rep gene, AAV Cap gene, AAV VA gene, AAV E2a gene, and AAV E4 gene.

63. The method of claim 62, where the cell is an inner ear cell.

64. The method of claim 63, wherein the inner ear cell is outer hair cell.

65. The method of claim 63, wherein the inner ear cell is in the ear of a subject.

66. The method of claim 58 or 59, wherein the inner ear cell is in vitro or ex vivo.

67. A method comprising introducing the composition of any one of claims 42-48 into the inner ear of a subject.

68. The method of claim 67, wherein the composition is introduced into the cochlea of the subject.

69. The method of claim 67 or 68, wherein the composition is introduced via a round window membrane injection.

70. The method of any one of claim 60, 65, or 67-69, further comprising measuring a hearing level of the subject.

71. The method of claim 70, a hearing level is measured by performing an auditory brainstem response (ABR) test.

72. The method of claim 70 or 71, further comprising comparing the hearing level of the subject to a reference hearing level.

73. The method of claim 72, wherein the reference hearing level is a published or historical reference hearing level.

74. The method of claim 73, wherein the hearing level of the subject is measured after the construct of any one of claims 1-19 is introduced, and the reference hearing level is a hearing level of the subject that was measured before the construct of any one of claims 1-19 was introduced.

75. The method of any one of claims 58-74, further comprising measuring a level of a KCNQ4 gene product in a subject.

76. The method of claim 75, wherein the level of the KCNQ4 gene product is measured in the inner ear of the subject.

77. The method of claim 75, wherein the level of the KCNQ4 gene product is measured in the cochlea of the subject.

78. The method of any one of claims 58-77, further comprising comparing the level of a KCNQ4 gene product in the subject to a reference KCNQ4 gene product level.

79. The method of claim 78, wherein the reference hearing level is a published or historical reference KCNQ4 gene product level.

80. The method of claim 75, wherein the level of a KCNQ4 gene product in the subject is measured after the construct of any one of claims 1-37 is introduced, and the reference KCNQ4 gene product level is a KCNQ4 gene product level of the subject that was measured before the composition of any one of claims 1-37 was introduced.

81. A method of treating hearing loss comprising administering the composition of any one of claims 42-48 to a subject in need thereof.

82. A method of treating hearing loss comprising administering a particle of any one of claims 38-41 to a subject in need thereof.

83. A construct of any one of claims 1-37 for use in the treatment of hearing loss.

84. A composition of any one of claims 42-48 for use in the treatment of hearing loss.

85. A particle of any one of claims 38-41 for use in the treatment of hearing loss.

86. Use of a construct of any one of claims 1-37 for the manufacture of a medicament to treat hearing loss.

87. Use of a composition of any one of claims 42-48 for the manufacture of a medicament to treat hearing loss.

88. Use of a particle of any one of claims 38-41 for the manufacture of a medicament to treat hearing loss.

89. A cell comprising a coding sequence operably linked to a promoter, wherein the coding sequence encodes a Kv7.4 protein.

90. A cell comprising a coding sequence operably linked to a promoter, wherein the coding sequence encodes a loss-of-function KCNQ4 variant gene product.

91. A population of cells comprising one or more cells according to claim 89, wherein the population is or comprises a stable cell line.

92. The method of any one of claims 75-80, wherein the KCNQ4 gene product is a Kv7.4 protein.

93. A construct comprising an inhibitory nucleic acid, wherein the inhibitory nucleic acid is or comprises one or more of miR1-155; miR2-155; miR4-155; miR5-155; miR6-155; miR7-155 miR1-16; miR1-26; miR1-96; miR1-122; miR1-135; miR1-182; miR1-183; miR1-335; miR1-451.

94. An miRNA selected from the group consisting of miR1-155; miR2-155; miR4-155; miR5-155; miR6-155; miR7-155; miR1-16; miR1-26; miR1-96; miR1-122; miR1-135; miR1-182; miR1-183; miR1-335; miR1-451 and combinations thereof.

95. A kit comprising a composition of any one of claims 1-94.

96. The kit of claim 95, wherein the composition is pre-loaded in a device.

97. The kit of claim 96, wherein the device is a microcatheter.

98. The kit of claim 97, wherein the microcatheter is shaped such that it can enter the middle ear cavity via the external auditory canal and contact the end of the microcatheter with the RWM.

99. The kit of claim 97 or 98, wherein a distal end of the microcatheter is comprised of at least one microneedle with diameter of between 10 and 1,000 microns.

100. The kit of any one of claims 95-99, further comprising a device.

101. The kit of claim 100, wherein the device is a device described in FIGS. 32-35 or a device as described herein.

102. The kit of claim 101, wherein the device comprises a needle comprising a bent portion and an angled tip.

The application's sequence listing, which the Patent Office published only in electronic form, follows.

SEQUENCE LISTING (310 sequences)

SEQ ID NO: 1 - RNA, 4324 nt, Homo sapiens
gacaugugagcggcgcgcgccgguggcagguggaaaggcgagcggcauggagcgcguaauaagagaguuggagucggaaagagcagccccagucgccggggaagcgggaggucagugcgggcuccggcggcccccaggcuccgagcgcccgcccgcggccccggcccggccccuagcccccgccgcccgcgcccgccccgggucgccccucuggccccggguccgagccaugcgucucugagcgccccgagcgcgcccccgccccggaccgugcccgggccccggcgcccccagcccggcgccgcccauggccgaggcccccccgcgccgccucggccugggucccccgcccggggacgccccccgcgcggagcuaguggcgcucacggccgugcagagcgaacagggcgaggcgggcgggggcggcuccccgcgccgccucggccuccugggcagcccccugccgccgggcgcgccccucccugggccgggcuccggcucgggcuccgccugcggccagcgcuccucggccgcgcacaagcgcuaccgccgccugcagaacugggucuacaacgugcuggagcggccccgcggcugggccuucgucuaccacgucuucauauuuuugcuggucuucagcugccuggugcugucugugcuguccacuauccaggagcaccaggaacuugccaacgagugucuccucaucuuggaauucgugaugaucgugguuuucggcuuggaguacaucguccgggucugguccgccggaugcugcugccgcuaccgaggauggcagggucgcuuccgcuuugccagaaagcccuucugugucaucgacuucaucguguucguggccucgguggccgucaucgccgcggguacccagggcaacaucuucgccacguccgcgcugcgcagcaugcgcuuccugcagauccugcgcauggugcgcauggaccgccgcggcggcaccuggaagcugcugggcucaguggucuacgcgcauagcaaggagcugaucaccgccugguacaucggguuccuggugcucaucuucgccuccuuccuggucuaccuggcugagaaggacgccaacuccgacuucuccuccuacgccgacucgcucuggugggggacgauuacauugacaaccaucggcuauggugacaagacaccgcacacauggcugggcaggguccuggcugcuggcuucgccuuacugggcaucucuuucuuugcccugccugccggcauccuaggcuccggcuuugcccugaagguccaggagcagcaccggcagaagcacuucgagaagcggaggaugccggcagccaaccucauccaggcugccuggcgccuguacuccaccgauaugagccgggccuaccugacagccaccugguacuacuaugacaguauccucccauccuucagagagcuggcccucuuguuugagcacgugcaacgggcccgcaaugggggccuacggccccuggaggugcggcgggcgccgguacccgacggagcacccucccguuacccgcccguugccaccugccaccggccgggcagcaccuccuucugcccuggggaaagcagccggaugggcaucaaagaccgcauccgcaugggcagcucccagcggcggacggguccuuccaagcagcaucuggcaccuccaacaaugcccaccuccccaagcagcgagcaggugggugaggccaccagccccaccaaggugcaaaagagcuggagcuucaaugaccgcacccgcuuccgggcaucucugagacucaaaccccgcaccucugcugaggaugcccccucagaggaaguagcagaggagaagagcuaccagugugagcucacgguggacgacaucaugccugcugugaagacagucauccgcuccaucaggauucucaaguuccugguggccaaaaggaaauucaaggagacacugcgaccguacgacgugaaggacgucauugagcaguacucagcaggccaccuggacaugcugggccggaucaagagccugcaaacucggguggaccaaauugugggucgggggcccggggacaggaaggcccgggagaagggcgacaaggggcccuccgacgcggaggugguggaugaaaucagcaugaugggacgcguggucaagguggagaagcaggugcaguccaucgagcacaagcuggaccugcuguugggcuucuauucgcgcugccugcgcucuggcaccucggccagccugggcgccgugcaagugccgcuguucgaccccgacaucaccuccgacuaccacagcccuguggaccacgaggacaucuccgucuccgcacagacgcucagcaucucccgcucggucagcaccaacauggacugagggacuucucagaggcagggcagcacacggccagccccgcggccuggcgcuccgacugcccucugaggccuccggacuccucucguacuugaacucacucccucacggggagagagaccacacgcaguauugagcugccugagugggcgugguaccugcugugggugccagcgccccuuccccaccucaggagcgugagaugccaggucgcacagagggcagcagcagcggccgucccgcggccucugggccccccagugcccugcccacuccaucaaggcccuauguggcccaccuggcaggggcacagccccgggagugggagcgggcgcuggggcccugggcccugacccagcuuccagcuaugcaaggugaggucucuggcccacccuucggacacagcagggaagcccucccgccaaguccccgccccacuugggggugggccaaggugcccccacagguacccacaaagcacaggacccugccacaaggcagguggacaccauauaugcaaaccauguuaaauaugcaacuuuggggacccccauggggucucucugucccucccccauugggagcugggcccccagcaguagcuggucucaggcugcuuggccaccacccugucccuauucuuuggcuuaucacuccuuccccucccagcauggggccuguuucuccccugcccucuccuaagggcaaugccugggccuuucuucccauuugcaagugucagcucccaggggcucccuccuccugcuggguggccacuccccuccuuggcccuccagacaccacucauagucagcacagguuucuguauccuccccaaaacucccagacagugcuucguggacgaucgcacaaacauagccuuuuaguuucuccagacaggaagaaagccucucacacuuaaacaugcaaugacgugacacacuuggagacaugagugcagagccacucagccgcuccugggccucugcagcagaugccaguggacuggccuugcagggugacgaccacuaagaggaagacccccaacuccaucugagcaggagaaggagcuuugaaguaacccgagagcucuccaggccccacccagaccuuuacccgcuccccuucuucaagaagaucuccuccucucugguccaggagcccuaacccacugccucugccuguccccaagggcccgccuccgugucuccacagcacaacucgggcccaggccugacaccacuggagagaccccaggcccacuucuagccaggccugugccuuccuagucacucuaacucccagagagaauaagaaugcauguaauagcuauaccaaccgcgcauccggcuuucacaugcacugucuccccucccuccacaccccacuucuucacuucaauuggcagcgccacauccaggcgucagcccccauucacuccaggaacacuuucuuauccccaccccuuugcuccucuucugcaaagccaaugcagguggcaggaaggugagggguaguggaccaauggcaacccucugugggaacaaggggccgaggccacgcugccugcaucucgugcuggggaccugcaugcgccagcaccagggcuuggacuggaucuuacucaguccauggugcccagccucugccccaacaugcccucugcaugugaccgucaugcccuggauggagccacuccuggcucaccccaccugcacugcacuguccccagagagccaccccuccacccacucagagacagcuguggagagggccaggagaaugggauuacccuaugaccaaggagacaugggaagaagcccuccuuccuuccacgaucgagguuccgccaucaacucgguucucggauaugcaaguaccucacuuuguuaacuuauuaacuuauugguuucauuaaaguuuucaagagga

SEQ ID NO: 2 - DNA, 2088 bp, Homo sapiens
atggccgaggcccccccgcgccgcctcggcctgggtcccccgcccggggacgccccccgcgcggagctagtggcgctcacggccgtgcagagcgaacagggcgaggcgggcgggggcggctccccgcgccgcctcggcctcctgggcagccccctgccgccgggcgcgcccctccctgggccgggctccggctcgggctccgcctgcggccagcgctcctcggccgcgcacaagcgctaccgccgcctgcagaactgggtctacaacgtgctggagcggccccgcggctgggccttcgtctaccacgtcttcatatttttgctggtcttcagctgcctggtgctgtctgtgctgtccactatccaggagcaccaggaacttgccaacgagtgtctcctcatcttggaattcgtgatgatcgtggttttcggcttggagtacatcgtccgggtctggtccgccggatgctgctgccgctaccgaggatggcagggtcgcttccgctttgccagaaagcccttctgtgtcatcgacttcatcgtgttcgtggcctcggtggccgtcatcgccgcgggtacccagggcaacatcttcgccacgtccgcgctgcgcagcatgcgcttcctgcagatcctgcgcatggtgcgcatggaccgccgcggcggcacctggaagctgctgggctcagtggtctacgcgcatagcaaggagctgatcaccgcctggtacatcgggttcctggtgctcatcttcgcctccttcctggtctacctggctgagaaggacgccaactccgacttctcctcctacgccgactcgctctggtgggggacgattacattgacaaccatcggctatggtgacaagacaccgcacacatggctgggcagggtcctggctgctggcttcgccttactgggcatctctttctttgccctgcctgccggcatcctaggctccggctttgccctgaaggtccaggagcagcaccggcagaagcacttcgagaagcggaggatgccggcagccaacctcatccaggctgcctggcgcctgtactccaccgatatgagccgggcctacctgacagccacctggtactactatgacagtatcctcccatccttcagagagctggccctcttgtttgagcacgtgcaacgggcccgcaatgggggcctacggcccctggaggtgcggcgggcgccggtacccgacggagcaccctcccgttacccgcccgttgccacctgccaccggccgggcagcacctccttctgccctggggaaagcagccggatgggcatcaaagaccgcatccgcatgggcagctcccagcggcggacgggtccttccaagcagcatctggcacctccaacaatgcccacctccccaagcagcgagcaggtgggtgaggccaccagccccaccaaggtgcaaaagagctggagcttcaatgaccgcacccgcttccgggcatctctgagactcaaaccccgcacctctgctgaggatgccccctcagaggaagtagcagaggagaagagctaccagtgtgagctcacggtggacgacatcatgcctgctgtgaagacagtcatccgctccatcaggattctcaagttcctggtggccaaaaggaaattcaaggagacactgcgaccgtacgacgtgaaggacgtcattgagcagtactcagcaggccacctggacatgctgggccggatcaagagcctgcaaactcgggtggaccaaattgtgggtcgggggcccggggacaggaaggcccgggagaagggcgacaaggggccctccgacgcggaggtggtggatgaaatcagcatgatgggacgcgtggtcaaggtggagaagcaggtgcagtccatcgagcacaagctggacctgctgttgggcttctattcgcgctgcctgcgctctggcacctcggccagcctgggcgccgtgcaagtgccgctgttcgaccccgacatcacctccgactaccacagccctgtggaccacgaggacatctccgtctccgcacagacgctcagcatctcccgctcggtcagcaccaacatggactga

SEQ ID NO: 3 - DNA, 1926 bp, Homo sapiens
atggccgaggcccccccgcgccgcctcggcctgggtcccccgcccggggacgccccccgcgcggagctagtggcgctcacggccgtgcagagcgaacagggcgaggcgggcgggggcggctccccgcgccgcctcggcctcctgggcagccccctgccgccgggcgcgcccctccctgggccgggctccggctcgggctccgcctgcggccagcgctcctcggccgcgcacaagcgctaccgccgcctgcagaactgggtctacaacgtgctggagcggccccgcggctgggccttcgtctaccacgtcttcatatttttgctggtcttcagctgcctggtgctgtctgtgctgtccactatccaggagcaccaggaacttgccaacgagtgtctcctcatcttggaattcgtgatgatcgtggttttcggcttggagtacatcgtccgggtctggtccgccggatgctgctgccgctaccgaggatggcagggtcgcttccgctttgccagaaagcccttctgtgtcatcgacttcatcgtgttcgtggcctcggtggccgtcatcgccgcgggtacccagggcaacatcttcgccacgtccgcgctgcgcagcatgcgcttcctgcagatcctgcgcatggtgcgcatggaccgccgcggcggcacctggaagctgctgggctcagtggtctacgcgcatagcaaggagctgatcaccgcctggtacatcgggttcctggtgctcatcttcgcctccttcctggtctacctggctgagaaggacgccaactccgacttctcctcctacgccgactcgctctggtgggggacgattacattgacaaccatcggctatggtgacaagacaccgcacacatggctgggcagggtcctggctgctggcttcgccttactgggcatctctttctttgccctgcctgccggcatcctaggctccggctttgccctgaaggtccaggagcagcaccggcagaagcacttcgagaagcggaggatgccggcagccaacctcatccaggctgcctggcgcctgtactccaccgatatgagccgggcctacctgacagccacctggtactactatgacagtatcctcccatccttcagcagccggatgggcatcaaagaccgcatccgcatgggcagctcccagcggcggacgggtccttccaagcagcatctggcacctccaacaatgcccacctccccaagcagcgagcaggtgggtgaggccaccagccccaccaaggtgcaaaagagctggagcttcaatgaccgcacccgcttccgggcatctctgagactcaaaccccgcacctctgctgaggatgccccctcagaggaagtagcagaggagaagagctaccagtgtgagctcacggtggacgacatcatgcctgctgtgaagacagtcatccgctccatcaggattctcaagttcctggtggccaaaaggaaattcaaggagacactgcgaccgtacgacgtgaaggacgtcattgagcagtactcagcaggccacctggacatgctgggccggatcaagagcctgcaaactcgggtggaccaaattgtgggtcgggggcccggggacaggaaggcccgggagaagggcgacaaggggccctccgacgcggaggtggtggatgaaatcagcatgatgggacgcgtggtcaaggtggagaagcaggtgcagtccatcgagcacaagctggacctgctgttgggcttctattcgcgctgcctgcgctctggcacctcggccagcctgggcgccgtgcaagtgccgctgttcgaccccgacatcacctccgactaccacagccctgtggaccacgaggacatctccgtctccgcacagacgctcagcatctcccgctcggtcagcaccaacatggactga

SEQ ID NO: 4 - DNA, 1071 bp, Homo sapiens
atgccggcagccaacctcatccaggctgcctggcgcctgtactccaccgatatgagccgggcctacctgacagccacctggtactactatgacagtatcctcccatccttcagagagctggccctcttgtttgagcacgtgcaacgggcccgcaatgggggcctacggcccctggaggtgcggcgggcgccggtacccgacggagcaccctcccgttacccgcccgttgccacctgccaccggccgggcagcacctccttctgccctggggaaagcagccggatgggcatcaaagaccgcatccgcatgggcagctcccagcggcggacgggtccttccaagcagcatctggcacctccaacaatgcccacctccccaagcagcgagcaggtgggtgaggccaccagccccaccaaggtgcaaaagagctggagcttcaatgaccgcacccgcttccgggcatctctgagactcaaaccccgcacctctgctgaggatgccccctcagaggaagtagcagaggagaagagctaccagtgtgagctcacggtggacgacatcatgcctgctgtgaagacagtcatccgctccatcaggattctcaagttcctggtggccaaaaggaaattcaaggagacactgcgaccgtacgacgtgaaggacgtcattgagcagtactcagcaggccacctggacatgctgggccggatcaagagcctgcaaactcgggtggaccaaattgtgggtcgggggcccggggacaggaaggcccgggagaagggcgacaaggggccctccgacgcggaggtggtggatgaaatcagcatgatgggacgcgtggtcaaggtggagaagcaggtgcagtccatcgagcacaagctggacctgctgttgggcttctattcgcgctgcctgcgctctggcacctcggccagcctgggcgccgtgcaagtgccgctgttcgaccccgacatcacctccgactaccacagccctgtggaccacgaggacatctccgtctccgcacagacgctcagcatctcccgctcggtcagcaccaacatggactga

SEQ ID NO: 5 - DNA, 63666 bp, Homo sapiens
gcaggaccacagcactgttgccttctgcatggtcttccagaggtagaggttagaggaaggatcttacaggaagaatcctgaaggcagaggaggagccctgcaagaagggagggctttgaccttcatttccacgcccctttctccctctgtgtctcctctgtgtgggccccctccagccctgaggatcaatgggggttcactttcactgagctcagcaacactgctccctccccacttcctgtggctctgagctgactggcctgcttggtctaggctgggggctggtcagtgccacacccagatctggggaaaagaaattccttggctggcgaggtggctcacgcctgtaatcccagcactttgggaggccaagacgggcggatcaggaggtcaggagatcgagaccatcctggctaacacggtgaaaccccgtctctactaaaaatacaaaaaaattagccaggcatggtggcgggcgcctgtagtgccagctacttgggaggctgaggcaggagaatggtgtgaacccgggaggcagagcttgcagtgagccgagattgcgccactgcactccagactgggcaacagagcgagactccatctcaaaaaaaaaaaaaaaaggaaaagaaaaagaaattccttgggcccctccagcacctcgtggcctaagtctcttgtcctttctgggctgcacagggaaaaggaagaaggccttatctttctctcatgcttcctcctgctctcagtagaggtgggttcccaaaggtcaataatgtgatgccatcaccccctgagcactctccactccaatcccctcctaggaaggcttcctagattgagaagaactgctaggaccagggaattcccagagcatctccctgctccacctgaaacacgtacctgaagagcagtcagacgaatgggtcacgtgcgtacagccccctgcatggtctctaactttttcatgcattattgcattcagtgctgatagccagggaaagtggggaagaggtggagtgacttgcccaaggtccccaggtattccacaggtggagctaggactggaagcccagccatgacttgtagtttagggctctttctgcccctggcactgccagcctctctggatgctggtgcctcccacttcacccatcctgggttctctcctagggagccacagcctctgcagcatgcccagcctcagggcctggccaggctccctgtttcttatcaggccaaattggaccctccatcctggcattcaagtcctcctgcgtgcccctggctaagcttgctcttccgaatgctctgtaacattcttcccacaccagtacacacacacacacacacacacacacacacacacacacacacattaaagcagcacctgagtgaattaacagccatacaaggcaagtctcttcactgagcctcagtcttcttgagtgtaacatgggaccgtgaacagtattaccgcacaaggttgtggggatgctgaaatagacaatgcaggtaaaacatcctgcataaggcttaggattgactgcaggcctcattaatggtagctgcaggcattattggttgtacttctctgcgtctctcccagtcctccccactcctgtccccaagaaagctccctctgccattgcctgtggagacttctccctcctctgagctctagcaacccttggagctgtaagaaagcccagggtcaggtggctagcaggcagagagattttaggaggcaagtgagtggaacccagacctcctcgcctcgattcaactagcgcacttctgctccaaagctttgtacacattggggtgctaccttacaattctgtcggtaaaaaggattccattgctgataaagtctaaaaatcactgacttaaaccaccccacctctcactccaggaaaggaacctgagcccttgattgacctggggtcacagtgggaatcactgacaggcttgagcctagcctgagagaccatagtcctagccacttcctgccctccatcctttcagacctggaagtttgatcccttggcacgagtaagttctagagaacaaggattggccgtgtatggttatcctcagctcccagcacccagtgcccagccggcaggtgccagtcagtggaaagcacaggtcacagttctgggggtcaccaataggctgtgtagacttaggtgagtccctgtgcctctcagagcctcagctgtctcaagcaagctgctgctctctggcccaaaagggactgggcctggcacacagatggcactcagcaaatggaagcactcgccctcccacccttcctctcagtcaatacttgctccattgatggctgatggggacagtgatgaattacagaagatcttggagccctgcccacttcttgcacagatggggaaacaagtccagggtggggaagagacttgcccaggtgggagtgagtcttagtgagtgcgtctgtctcctcagtggggcagggaagctttcgcagtgttaccagggtggagacagggcctgggggtggaaaggaaactgctgagggtggggtcaggggaacaggtgggagagggaaggaggagggtagggaaccacggtgtccagtcccctccagcagaggggccaattgagggagcctgagacagctgtttgctcagaaaagtgtcttagtcactaaaggttgtggtggggaaagtccgtcctcccagtcatgtcctgggaatccggatggcgcaggaaggccacccggtgaccctaagagtggccacctgtcctctctgaactggactttctcttctggcccttccactcttccatgtgtacacatatgccaagtaaatttgctgtggcctcctggaaccatctcccccatccctctcaccccttaggaagagttctgtgtccctccattacccatacgcccgcaggagaaacaggcttctatgccctatgaaagtccttcctgagatctaacttccatccctctagctgcaaccacagtctctttcctctttctgctgcctttgagcaggtaatctggagctggagttgggaatgatgagacactccctgcagtgagggctcctcacaaggtggggaagggacctttgtagtcccccagctgggaagagagccatgggatccagaggtgatgctgagcttgaagattagatttcccagaacagacccagtttcagatattctgggtgttaagggcaacctgaattcaaattccatttctgctacagaacaagagcctcaaaaagaccccctagaaacacccccagggcgcttgcaactgctttcctgtgcacctttcatgtcctagaccttagtcccatttcccaggatctatgattgagaagaaccagccaggcagttccacagagggaggacagtgctgcatattttgggggtgccatcttcagctcatagagagaagatgggttaactcagcccaggcaccacatccctagtggggccttggggtccagaaactgtccccagcttccagtagaggatccgggcataacctgccctggggcacccggctctggccctgggcacacctggaccaggagcagcagaagagattcaggtcagaccccagagggcacccccagctaggcagaggggaaaggatcactatggggtaggggtgtgggccggttgccaagcccagtttagggaccccacagatccctgcagcccacggccctgcctccctccctccctcactggcgctcagcagatcaatgctgcctttgctgacagctgagaatcgagctcgccttcccgccccttcccccgcccctcccgctcggcttcgtccctcgagatcctcccggaggaaccgggaagagtttgctgcggaaggctcaccctggggcagggcctgcggagggagcggctggtgtggccgcagctttccgtggaggaagagggaaagaggatcgggaaacccaagttaccaaccctgtgcagggcccaggagggctaaaggagagggactgccccctacagccagagagatggaggtcggggactaagaaaaactttccagctggagagggaatgccctgggacaaagtatccccttttctggctgggattctgtgggccttgggtagggggtgtgtgtcccctctaaggctggcttagagctcatctcccaacactccatctgcccaaacccagttccctgacctgggagtggggcaggggagcaggcccctccatcggggaggatcctcttctgggcagggtggctcttcccccatcacgatgaagggaagctcagaggtggcagttggtgggagaaagacacacccaggcccactgtgttccacacaccctgatgctgcctagcagcccgtgggctccaggcctttcaggtaagagcaggacaaccgccgctgcccacccagccacacacagcactgggcacactttaagcacccgcaccaggcacacagtgctcgaccccaacggacacacctcatccccttcggactccacctccactttcgcagccacccacacccgacccataactcacacctcactgactccatccccgcacctggtagacccacagccacccaccctgcacacacaagtagacgccgttccaccggtctacacctaaactccacgggacactgcgtcccttcccctgccgcccgcggccacaactccacattccactttccacaagcacacacgaggcgtcccaccccgggctggccttcggggccacactgccccacgcagcggtggacaccacttgcacgcgtccggcttcccggccccgcgcgctgcccccgccacgcggttcggcccaggcaccaactcggccgcccgtgcgccctgccccgccgcctgctccgcgcgttccctccctccgcctcgcctcgcttgctcgctcgctccctcccgatttgggaaggcggccgcggggcgggcgggggaggggcggggcgggggagggtgacatgtgagcggcgcgcgccggtggcaggtggaaaggcgagcggcatggagcgcgtaataagagagttggagtcggaaagagcagccccagtcgccggggaagcgggaggtcagtgcgggctccggcggcccccaggctccgagcgcccgcccgcggccccggcccggcccctagcccccgccgcccgcgcccgccccgggtcgcccctctggccccgggtccgagccatgcgtctctgagcgccccgagcgcgcccccgccccggaccgtgcccgggccccggcgcccccagcccggcgccgcccatggccgaggcccccccgcgccgcctcggcctgggtcccccgcccggggacgccccccgcgcggagctagtggcgctcacggccgtgcagagcgaacagggcgaggcgggcgggggcggctccccgcgccgcctcggcctcctgggcagccccctgccgccgggcgcgcccctccctgggccgggctccggctcgggctccgcctgcggccagcgctcctcggccgcgcacaagcgctaccgccgcctgcagaactgggtctacaacgtgctggagcggccccgcggctgggccttcgtctaccacgtcttcatgtgagtttgcgaccccgcgcccttccgcgtttccccgcgcaagcctggcctcccggggcacggccgccccgccctggctccgccttctacccccctgcctcagggccgaccctcatctctctccccccaggcctaagcccggtttctgatcccctcgctgagcccgaccctaagccctgatctcccaggcctgacccctgcttgacctcgcttctgacctccccgcaccgcaactgcttatttccatcctgaccgccaatctctgctcctctgtcccaggtactcccgaccgccagctgcctcccccaagtccgcttggcgaagtctggggcccctggagtgggcgcccttttcctcttccccacccctgcctccctgtgtcccagacacaaagaggaacccttggctcccacacgcttctgtcacctgctccccagctctgagctatgaagggctcccctcaggggtgctcctctccagggcggccctcattcctacccctgcccagctgactgtgggtgtgtgggggtccctgtgggccccctgggccctgacactcgcatatgctgtgtccgacttgatctgtgtcttcgctcagtcttcccctccaccctcaacttcccagtggcaacggcggccgccctgcctgccctgccctaccctgccggcttggcccagctcgcctgccttgttggctggcagcaccaggcctggctctaggcaccaggggaaaaagaaagaggagaggggtaggtttggaaacactgacgctgctggggccccctcctccctctcaccaggctcctacaactttcaaaaacactgacccctcttgggtgtgaagagtgaattttggcagctcagagctcagtcttggggtacggcctggcccagccaggaacatgagaggccccgcagatatcagttgaagggctgggcctgacgctgggacgctcagaggtgcccagagagagacctctggtccctggaaaatgtgtggctattaatccctttttgctgccaccagagagggccctttggcgctggggtctcctgggtggcccacctgcctgcccacctgactgtctagcagccctcctgctggcctggctgtccctctgccagcctgagtttccacctgtgtgcgagttggccagtctgctcacccttccacctaactgtccgcagtccttctgcttgcctgtttccatccatctgtggcctgtgcagttatccgggtgcctgtctgtgcatctgcctatccacctgtccacctgactgtccactcttcctctacctgtcttttccacctgtctctgggtctgtccttcggcctgtttctcgggtgcttgctggcctgcctctgccccatctgaactgggcccacataatttcagaggtgaaggggagaaagatgcggcacagggaggggcagggggggaagacagcagggctctctcggccattaagtgcgttgggggtggcaaccttgactctgtgcagagacctcagctgggctaggctggggcagagagttgaaattgctcaggacatgaggtcaagcttcggttcagggtcaacggtttgtagtagcccagtccttagtgtccattgggaggcctaggatgaatatttgtggctataaagaggcccgttggagtgaggaaggcccagggctggtggagttgggggtgaggggatggggactacttcttaggagtggctacagagcagcctccttgagtgcctaaggagggtgagacaccccccagagaacaactgtgccctccgtgggctcctcttgggaagggacttttccaaggcatggcagggcctggggaagccaatagggctctgaggtggggtccttacccccccaggcttggccttacagcccccacaagggtcagtggaggtgaaggacctgcctcctgtcccctggccagctgctgttggtgcctcctttgaaaggaccgccccttcctctccaggagctaatccactggcacctttgccccacatcctgccctttcctgatgccaggaaatgccctcgccagggccgtgcttgtcctgaccacttgtccccgggagcccagggccagggcatgtcttgggaactctgggggaagaagtatggtgtgaaagtgtcctggtgtttaaggatctcagggaattggtcacccatcttagaggtcaaaggggacagaggtgtcaggaaccccacctcttatgtgctctgtgacgttgggttgattgctgggcctctctgagctttaggtctgtaggttgtcaaagcgggtagaaaccccaaccttgcggcctctctcttggatgaggtaatagagtgggaaagagcttggtaagctccaggggcctgtctgagcttgaaagacggttgttattattggggctggaggagggggcccacacagaaggtctctcctgtttgtgaggagctccagatgtggggtttctcagtcacactgcagggtcttgccaggaagtacttcctgctgttggactcctagccagaccattacactttgggtcaaatcctttctcctcttcccaatctgcctcagtggcagcccaagtgaggggagtccagggagtactgttagctaggacccccttcccagagacgcaggctgtggcaggaggggccccagcagaagagcctgcaagagaagggctctgggcggggcgcagtggctctcacctgtaatcccagcactgtgagaggctgaggtgggaggatcgcttgagcctaggcaacatggtgagacccctgactctacaaaatttaaaaattagccgggcatggtggtgcacacctgtagacacaattacttgggaggctgaggtgggaggatcacttgaacccaggaattctaggctattgtgaactgtgattgcaccactgcattccagcctgagtgacaggatgagaccctatcaattaaaaaagagagagaaagagaagggctcaggaaggagggagctggggtgagaggagcgcattcgccctagggtatgcctccctcccatctgccagcccgtcccctctgagccccacacagaacctgcatctttctggctccaaaaggtgggagattgcctagagtacaagcccagatttggcctgtcctgcggcagctgcaagctctgggaagagaggactgctgactcctgtcttctcctgttgggatccagaatgaggggccactgagcccctctccaagctttccctctctctgtggaccctcagtctgatcaccaagctgcatccccctcctatgccccagtccctgatttaagccctgaagccttcacaggccctgctctctgaattttaagaaataccacctcgtggcccatcctgctcgctgagcccttatggggaatgctcgctgtccccttgctgccccctctcaaaggccactccagcttcccttgaagtcagagtgctggagggggctgagcaagaccctatctcccttcatcctccccagccactatgagccgcaggcctgccgctcccagcccccagggcccagcagactttctctatgtgaaggtttgcggctctgtaaacatcctccctcagccttgtccgtggggtcagaagctgtgggaatggggaggggaggaggtggcagcagcttctggggcccgcagactcctaacccccgagcccccgacctcccaccccggccatctgagaaagaacatcgcctgggttggaaatcatcccagcaaagtgtcctcagaaccctcaggcatccccgctaggtcagtcggtcctcacattttgacagccccattttacttgtaagaaaactgaggctctggagaccaaagtcacctgggaaatgagtagcagatacagcggactctgtgcagagacctcagctgggctaggccagggcagagagttgaaattgctcctgcttccttgtccaggactgttcgctccgttcctagtggccaccgggcttggctcttggagtctgaaatgaaatctctggttgtgtgtgcagcaccaactatgcacagggcaccctgctgagctctctctaaaccggtctcattgtgtccttctgcagccttgtgaggtgggcactgttatcctcctcatttgacagatggggaaactgggactcagcagaggccacccagttaatgtggaagagcctcagcccggagcgggggctgactgggagctgttgcgctcagcaccacagcctcagctagcagcaccccaagtccaggctcctcaagaacagcactcctgtgtcatctgtccgtccatcccagcaccccgcacacagtcagcagggggtgggcagtgatggcattttgtggaattgagtggaaactgccagcctcacccagtgcagccacgttttagttgtagaccacgtcactgctgcgtacctgtctgaatgtctcacacatgcactcactgcaacatcgacacacatgcacaaacacacacacagcatccatccaacaaaaagagttctagtttacagctgcccctaccttttccctgacttcacagacactcaccatggacacacacccgggcccgtggctccagcccagacccctaggacagaacaaagcttgctcctgtccttgagtttttggccttcacctatacacaactgcagggctgcccttgcgggtctgtgtgtatttgtgtagccaccttggagggcagcctcagaactgtggaggagcggggtggctggcctcgtagaacttcgctggcgtttgctcctcctggggggtcctcgggggtcctttgatctgaccttggggtatactgctgggtacaccaagacacagaaaggggcagctactcatccaaggtcacacctagtgagttagtggagaactgtgccaggaacccaagccttttgtctcccagatcaggactttagataacaattttcctaacctagccaacaggggagatggatgctctaagaactttgcccttgtgattgggaaagtctttgagtgtgacccaaatttttcgtgctgctgtttttcagccctagtccttttgcttggtctttgtaaggagctggggagaccatcctgttcttatactgccttcctcctcctccttgcactccccttcacgctcctttgcctccttcttctgaagttctttggtgtcactggagccggttcgatctctcactgacggcccaccccaccccaactccatagtacgttcattcttccattgaagacgcgctgctagatgtctaacttcaatccctattgctgccgaagcccttatccttgggatatttaagccaggagtgtttcaagaggtggttattattcttgggctgatggcagcactttgagtggatgattaatttcaggctctctgagccagtcaaaggagctggaactgcctgggagcagggaaaaaggaaggccgaggccctgcccacaaaggaggctgcccagggaacttccccagactccctcctacctccctagcaccaatgtgggtctttggggaaggtccgatcttcttgtgggctatggagccccccagcagggaattctgcatgtttgccctgggggaagctcctagtgtgggagttgagaggttgaggatgggggaatagcagggacttttcgtttctccagaagctgtcctgcggggagtgaagagcacgggctctgaggctgacagatctgcgttccttcctggttctagccttagcagtcgtgtgtccttgggcaagttacttaacctctctgggcttcagttttctcatctgaaaaatgggagtaatcataatacctgcctctaagattgtcaggactggatgagataaggcaccgaacactgctgggcactgttagccatgatcatcgttactgttattattatgctgttatcactgtcctcattcttctcctccggggagaggtgtggtaggtgtgctgggctcagcaaggtgagtgtgtctgagtctgctctggagagaataggagctatgtctgcctgtgtcctggggcgagtggttctccatgggagctgaggctgtgtcttttcagcctcctgtgggccctgcccatgagagtgtctgacttacattctctcgtgtaacgctcacagccatcttatcaggtgggtgctgtcttcttcatgtcacagttgagcaaagtgaggctgggtgaggggatgtcacccagctcatgaatggagcccagcctggctacctagcatgctcactgatttgtttcttccttcatctggcaaacagttacagagcatcagctccataccaggaccagggagccagagagagctagaccatgcctgtaccctgcctggcagagtgggggattgggggtcactgtgaggaggtcgcagagtctgccgggaccactggcctcagctgcttcttctcccagggagaggtttggagagaggtctggtctgtgtgtagctgtgagtgtgtctgtgagttatggggaggacggtgtatgccagagggccactgtgcggccgagtttgggcctcatggtccaaccctggcagctggcctggcccccgagagataaaagtagagccatggtgcccagagagacagccagggactcctgggagaggagggcactcccccactctctcctgagcaaatgatcatggagaatgagggcagggaatcccaagggagatttagagatctcagtccccatgcttactgggaaggtgtccacccccactccaccccagttcctgagcctcggtatcttcttctgtaaaatgggcctaacaggaaagtggacctctcagggctgcctggcacacagtcgtggtgggcaaatgagagagactgctgtctcaggaccttgaaatgcatagggtaccaggtagggagctctcttccagcatcttctctgggggcccctcaggtgacagggtgccacttcacagggcactcagggggctgcctgcccccagtggaggctctgaggggctggagaaagggtgctgagccgacctcagtggctacacagagcccccaggacttcaggttccctgggcaaccctgtccctggggcaggagctgcgtgccctggggatgaggcacaggaggggcagccccaggcagcagactaattgggctgggaatccgtgggcagcgcctgaggaagggaggcaacaggagctcagcgattccctccctcctcaccccacggagatttgggggacagtggatagagcagggtctctagcctaaaggatggagggaaaatcttgaggcacattctcctgagactccttggacacccaggccgggaaggtgggactggaggaaagctcactggaaataaatggagcatggttcccatcaaagcagaggagatggaggtcagacagcaggaaggactgcccaagaaccaggaggtgaatgagattttctgggatattgtttcaaaaacttggagccccctgtctagccgggctggacaacatttactcgaattgtccctatcaagcaaggaatggctccctactcccacagagcgaaagatggaggggagatgcctgttccctttgagcccaactttggcggggtgtgggtcgggggtggggtagggatcagatcgggtacccactggcttttgggcagtggtgggagggtcacaggctgctcctccttctctgccacttctctctgggagcctcgggcctgtccaggttgctgtctttgggtttattttttgctgggcttggctgtcccctgggaggggagggggcagggagagaaaggaaaagcaggaacagctttgtcagcacaatctcaggcgccttcgctactgcccgtcttggcccagctgccaccctctactggagggaccagcccctgggcacagtggggattcagaccctatggaacttcctcgcttagaggcaggaccagcaggaagggactaggcctttctacccccatcctctctccatatatccctgctatacagaacctcaggtctcagcgctggagcagatccacgggcttcatttcacaggtggggaaactgaggctagaagggacctgatggctcaagggcacagcccacacgggggccttttccaccttccctccttatggagtaacatgggagaaatgctgcctccctgctgcccgttccctgggtgaactcattcactcatctcattttccagcctctggggattggtggcagtctggtgggagagacgggggacggggaaaggacagtgtgacccatggcccagcagaggaagggaggtacaacctggggatgcacagaggctaggtgggggtatcaatccctcccctatatgctttttatcctaaaaaaatacattcgccctattttacagacagggggattaaggtgtaaagaagttaatgacttgcccaaagtcaacatagctgacaggtggtagaggcaggatttgaacctagcatgtgcatctctgggagccatgcatttggccactccaccatgctgcctccccaaggggcccctgtgggcccttctttcttttcttttctttctttcttttttttttttttttttttgaagcagggcctcactctgtcacccacgctggagtgcatgatcactatgatcactgcagactcaacctcctgggctcaagtgatccttccacctcaccctcctaaggagctgggactacaggcgcacaccaagacacccagctagtttttaaatttttctgtggagacagggtcttgctatgttgtccaggctgatctccaactcctggctccagcgatcctcccacggtggcctcgggagccaccatggctgcctgctgggcccttccttcttgaatgcaacccccctggctttcctcaaacctgcctctgtggcttttctctcttggttctatcagcaagcagctctgcctcctctttctgccccttgaatgttggggctttgtctcaagtcctcttcacagtacatagtttcagggggtggtctcatgcactcctacgacatcaggggtcacccctatgatgacagcctccgctctgcagtttcatccctgcgcttcctgcctgctgacacctctcctcctcattccctgggcatctcaaactcagcatctccctccaaacctgccctccttcctcaatccatgtgacagtgactccccgatccccagtgcccaagtcagaaatgccctccacacaagcatcctttgctctcacctaagaaatgacttacagtgtcccaaagcattgcgctgtttagtgcttctgtgcttttccttctgcctgcaactccctcccctcttctgcccactgcatcatctagctaactcctattcatccttcaactcccagtttgagcaccacctcttcttggaagcactccctatccccattacccccaggctcaactgagggcccttcagtgcccccagagttctgttcacccagccctgtgcgttttttgcttttctgcatgggactatgagaactgggtgtgtgggggttgaacacaattcttggcacatggtcagcaatgagtgaatgtttgatgaaggtggcattggggccaagtagtaaggatgagaagggttttgccaactagagagaagtggagaaaagacccctcagccctctgtgtggagcactgagctgtgggtgttcatgatttttatcccgagtgagctccaggtgaagggaacagcagagcaaaggccttgagatgggacttccttcccctcactcctttgccccaagacctgcagagcacagggccttgattgacaggctgtggaggtgggccttaccctgtgggcagtggggagccatacacggtgacaggccagggtggggacactggatgggaaccagggtttgactctttctgagtgagtgctgtgcagacgtgaggtcatctattttttccagtacccgctaggtagcaggcactattattgttcccattttgcagacaagaaactggggctcaaagaagagaaacaccacatactaagttacacagcttgtctgtggtcgagtcaagactcaaacccatgtcggcatcagggccaagcccgagctctaaatggttctcagcctcgccagctgacccaaggcagtttccagtggcctaaggcaaaactgaggagaataaggacggggtggcgactctttcataaagctaaatttattccacttaaaggactgtcttttagtatgagatgatgtcctttcttttatgaaatgatgggctgggaaaaaaatgtccttgcttggcaaaataaaaagttgacaaccttatgcagtccccaaagtgtttttggaaattttaccggtggtgcgtgaaatccctgagtctgggcgccatcccggctcctccccactgagctgtggagccagaagagggaggggtctggtagggacagagggatcaggggacagaggagcctcaggtcccgcactttgcagtgaggaccaacccaaggctctttcctaagattgggttgggcgggtgggggggtggggggcagatcagccagaatcaagggctcacccctcagttaaaggagcactggaccgggaggcagcaggcttgggctcagctcctgcctctgcttcctggaggctgtgtgatgccaggcaggtgacccaacctctctgaggcaccagcttccttatacatagaatgacaattgccatctgtccctgctcacctcacggggctgcttcctatagcaagtgcttggtaaactgcaaagtgctgtgaagaacaggggggttgtggtggttttaccttttttttttttttttttccttttgagacagagtcttactctttcacccaggctggaaggcagtggtgtgatcatggttcactgcagccttgaactcctgggctcaagcgatcctcctgcctcagcctttcatgtagctgagaccgcaggtgcacgtcacggcgctaggctaatttttaaattttttgtagagaggggatcttgttatgttgcccaggctggtttcgaattcctgtgctcaagcaattttcccaccctggcctcccaaagtgctgagattacggacatgagccactgcacccagccctggttttactgttcttatcttgccatcagaggatcccacttctctagggtcctgggcccctcatctcactttcacttttcacttgcactgctttgagccctgaggaagagacatatgggggagcggggcaggtggaatgacacaggccctgtaaaagcagggtggccacactagcaattcctgtcctcaggctcccctggaggacagctcagagatgcccaggctggagacctggggaactctaggaaaagaatgcacgaagctggagccaggctagagttctaagcacagactttgtcactgagtaataagattcatagtctaatctctaccaggtattgtgctaaatatttttcacactgcttcatttaatccttccaagagccctatgaggtaggtcctatcattatccccattggatggaagatgacactgaagcttaaaggtgaaacactgcccttgtcacacagccaggaagtggtgaatgcccaagaggacgggagttttctgggctcagctcagacaactgagtgcctggagaggccgagtgtgcaacgattctgtgacatgagagggtgggaacggtttgcaggactgtggtggggggccgagggggtaatcagtgcacatcaggggcaccgggttggggtcggaaggcaagagacacgatcctgctggctagcttctagcagtcacctccctctctgagtctcagcctccctctctgctctggctctcaataataacaaagataatactagcaggaccttactgagtgcttaccgtggaccagatgctgctctgagagcttgccacgccttctatcactttttcctctcaatgacactatgaggtaggtactgttattatgcctacttttcagatgaggaagttgaggcacaaagaggttacgtgacttgcctgggtacatgtagcagggccaggattctaaccacaagagtctagctctataggctgtgatcttacccacctaactcacccggactatgtctgcctgcttctaatggggggtgatattaggagaagttgagccttaaagttcaaggtcctgggccgggcgctgtggctcacgcctgtaatcccagcactttgggaggcagaggcaggcagaccacctgaggtcaggagttcgagactagcctggccaacatggtgaaaccccgtctctactgaaaatacaaaaaattatctgggtgtgatggtgcgcacctatagtcccagctacttgggaggttgaggcatcagaatcgcttaaacccgggaggtagaggttgcagtgagccgagatcgtgccactgcactccagcctggatgacagagtgagactccatcaaataaataaataaataaataaataaataaataaatacagttcaaggtcctgctcccaccccgattctaccctggggactcattccttccctctctcgccctttcatttgagaaaccttcacttctaaatgaagttcagctgcttatgccagtctccccgggccaggccctgtgccagactctggggacagagcaatgaatcagaccttcctctgctccctgggggagatgggctgggaagctggcagttaccaggcagggtgataagtgccactgtccaggcagcacggagtccagtgggagcccagcacagagggccaagccctgccccaatctgggcatggctgggaaggcttcccagaggaagaggcttaagttgagactgaaagatgagtagaagtaggagttagctaggtgaaaaggagcaaggaacagtgtttcaggcagagagaatagcacaggcagagacccagaagtgaggctgaacagggcatttgcaaagaacagcaagaagtcagaagagcgggatcctagaggaggcaagaggtatctggagaagaggctgggatgcaacagggccaggctcggcagtgaggacaccgggctggggagctgcagcttcctgagagggtgatgggaaggaagtgatgtcaggagtaacatggcagattcgtgttttagaaactcctttctgggactggcgaggaggatgctggaggggtaaggactctggcaaggagccctggggatgctaccaacttgtccccctttttcctttaccttccccccagggtccagcctcctgagtgcctcctccagagctattgaccaaccctgctcagggcctggctcaacctgacccggagccctaggactttgcctatagggaaagttcagctgcttatgcaaactctggcttggggggagatgtgtgtggttgagctgggagctggtggtgtgtgggggtggccttggaagcagagagggtgggtgcaggcgccgaggctgtctggaaagggagtctggggatataagcttggggtccatgggggtccctagaatagtggccttataatggctccaagagggtacactgggatttggcccagataatggagggacaccctggcgaaggggcagagtcctggcagttcagccagccccagctctgtctttttcttgaagctcaacagagtatggaaatcattggtctcacccagccccctcattcttctgagggggaaacaggctcagaacagggcagggactaaactcaggtcagcagtagagcccagaccagaacccaggctcagtccaagcatcttagttgtctccaatgatgataaataacagtgaaaacctttctgcagagcttcccaggggctggcctgggcttaggcaccctctggatggtcttgggcagacgtttttcacatctcgagccttagctcgaggtccaaaatactacctgtactgggaaggaggtcctctctcccactgacagtccacaaagccgttttaggcatgctggacccattgtgggctttacttattgtttgttcaatgaatcccactgaattcatgtaacaaccctggaggaagatactattatgctattttgtgctgaggctcagaaaggagaagtgacttgcccaaggtcattcagctgagaagttgctgacttagggctggactccaggggtccagatgcctgtctaggatccctgatggacacagccccatttttgagcctgcgctctcagcgaaaatcagttggtgtctcaacgagacccatcgtcagctgggcagggtgtgtgtatatatgtggaagctgggctgggctgctggctggaactcaagccacaccaacccctgtgcccctgtgtttggacctggctgcagctgctgcccgtgggggaaggggaccttgccacttgccctcctgcatcaagggttttttctccttggcctggctgcctgggcaaaggagctggctgtggcatgaccatgtgggcacctgccagcccctcccttgttggggtctggtcatctaatgcccttcacatgacaggcatggggtgggccctggctggggagagggatttgcactctcctaatccaagggctgcagccctccctctgtcttggccagggccgtgggagaggtttgtccttgccccatgcccagcagccccagctcagatccctggcatacacccagttcctctgcttggggccttcccctgtcctgcttctgctccccaccctcctactctgtgagcagaatcaggagctagggggcaatgctggggcattcaggactgatggaggtgcagtgctacatagcatgtgggactgaaggatgggggcgatgtcagggaggtttagggcacatgttggggcaaagttgagggaagatgattggggtgcagagcaggagtgtttggggctcatcctgggccaccccttcctggaaaaatttggctacaagtcagggaggcaaatgtgtgggccatgccccccccctcgctaggcagtaaacactgccgtcgcctgggagacaagaaaacatcttggtccccccacggttgtttataccaggactccctctccttctctggcctggtctggcctctccactcctgagctgggctacctgagttgagggtccagcccccggtcatggcaggaggccctggcagcacgcccactggcccccaccagggactgagcactcaccacctcctggtggcctgtcccattggaggccctaggtcttattgatcagaaacgtgctcccaagccttggcctccacgagggaggcctgggactgtgccctggatttgctccaacccactgcctgaatgcagtcactggcctcccggtaacctcagcttcccatgttcagtagcaggcaggatctagattagagcttttcaaactgtttcaagtcatagatctggttctttgaatgacacctgatacagaagcacaatatataaaacagatcaaagtagggctactctgggtggagtcacgggttggggcccagaattctacccactctatgccagcctatatggccctggcatatcaacccagagcctgtacatggtcctccttgctctagaacacattccaggtaaccctggaattccctggccaaatacttatgcctacttccagggtctgcacaggcccttctcccaggggctgtcagagcagccctaggctcaaggacggctgtttgtagtgggtatagcaaaagcccggaagagcaggctgaggcacccccaggagtgtacccaaggcccctcccagggagggatgggcccagtgtgggaagagaatctgaggatcggagggtagcaaggggctggctgtcccttccctgctggattccagcatgggattccaaggcatccaagaactaaaattcaaacctggtcttctaggtcattatgaaggtatatgtgtcaggaaggatagagcaaattttatttaaaagtttgttaacctgattgaaacttttaaatatttagacttatggtatgtgggtctccatttatactctctccccagtcctgccagagttaggggtgagcttgcatcaatcctccttccacccacccacctacctctgcagcaaccccaagacagccttacccagaactctcaggcttcacaggacagtgtggaagtcccactcgctgaaactcaaggccctggtgactgcatctttctgttcactccccagatactgtctgagcatcagctggggccagcctgggggttgtggaggagccagactggccttgccctagagggatggatctcagtgaggagtaagcgggtaggaacactctccctcttgtagaatagtgtgagaaggggtgcctgagggggcccacaggggccctggaatcctaacgaggggctaaagaagctcctctattcaaagccgatcatggatggatgaggtggaagagagacagcccaagaaggggagacagtacaaaagccaccaaggtggaaatgtacagggagtggagaagtcgagtgtcgctggtgcttaggatgtgtgtacagcctcaaacgctggtctaaggagcttgggttttctattttaacagtaagaagctgttgtaggattgtaaatggggtaggggctgaggaagaggcattcagactgcaaggtaagtggactggaggtggggatagggggctggaattgtggtggtcagtgagaggctggctggggggaaggggaatgggggtgagtcctgggctgaccaggaatgggacttgaggggctaggaagaaagaggggatcttaactctgctttctgggaccacatctcctatctcctcctcctttgttctgtctcagtttttgtcttcttctcctgctattccactgccctaggtctccaggctggggagaggggcactcaccctaaaccccctctccaaagcaggccacttcacacaagtggccaggcaagaggccgcagttgtataagaggcttttctcagctggctggactactcattcgttcatttattcattcattcactcaacatttattgagaacctacaatgcaccaggccctgcactaggttttggagagaaagtaggaacaagatcaagtacctgcattcatggagcttacattgaggggggcgggagaaccaggaactgtatctatccccggtgtctaccatctggcacctgtgcctgggctggatgcctgggaacagggactcttcccattacctactcatttgttccagctgccctgtgtcagcactcacctctctggacaatgacagaggagaaggggtcccatgcccaggatgccagccccagggagcacctgtctctgtaagaacagcctggccctcggggccaggacctgggctcaggcctagttcttcctactcactcctgactttgagccctttgcaaggacccgactttgatttctttatctgtcaggtgggatttggggaggtcctgaggaggcgaggggaccagaatactggacctcagctccagtattctcccttggtgggcaactcctttggctatgatgggagggggaagggggcttgggactcaatattatcatcattacccatacaagatagtaatagttgctacctattgtgtaatttattccgcactatctgtatggtcggtgtgtcttctctccccattttccggatgaggaaactgagtctccgtaaggtgaaatgacttacttgaggtcacacgtgaaactacctactccaagagccctttaggatggtgctgtgaggtggaagggcgaggccgaggcggcggtggcgtcgcgtcccccctctccgcccctggcctcggggacgcggcggcaccttcacactttccgcttggcccgctgctcgcctttcaggccgccgcgttttcaattgttaatttggaaacggaaaaagtagccggccgggcgggggaggccgcggggaggtaatcggagccgcagcaccgccccggcccctcccgctctcggggcctggcattggcaaagccccgcccctcccagggacgcaagagccccgcccaccattccccgcccccggcatgccccgcccatttccgtaagccccgccctcgccgaggcgggctgggggcacctgggagtgccgagcagtggcgcccctgctgaggagaaggagcccgggcgggggaagggggccgagggctgtgctgggggaggagtcccccaggagccctccccgcaggaacccgtacctctcccgagaagtcgcgcagggtgtctgcttcccttgtccctacgtgaacccaagcctttctgcaacccctctgtaggttcacccaggggagacccctgcctccagactgccggaccagggatcattggtcccattagaaagacgaagaaactgagtcctgagagggacagttaacttgctaaaagtcacacagccaaggcagagcagagctgaattcaagcccattcttttgactgagatacatttagggactgtctgcctcatttagaagaggagggggcatcaggaccagagatacaatttgtccccttccccctatctccagcacggtttctgtggttagtaagttactggaagttctgcttatcattattcaattatgggagggttttggaggtagaaggaggtccctctaaactttccatgtaaatgaaatgtaaaagaccctcttctggggactcccagaacacagaagtccctgaggactggcagcttcaggagccgtccacggccttgcttcccattagggaagctggaattgccagtcccagatggatcagcaaaaaatagggccctcagagactcccacccaatcccttcctcccactgaggaataagctgagactcagacacagtttcccaagtcttcagctgactggtggcggagtcaggagacagaacccaccgacccagctttctagctgtgtccacgcccttctgcttctccctctgctgccccccaatcctgacacctctctcacagccaccactcaggatcctgcctccatcagctgggcctgcaggctgggcagcctttctctttacaggcggaggaaactaagaagagtatctgcagatgtcctcccagcttccagttaaagaccctcccaaccacccttccaccttagctgtgggtcaggcccagagaagctgcgctcctggcctcgagtcacacagcaagccttttccagcttgcaaagcccactggattcagtctggctggtcctggatttggggttcccactgggagcatggctctcagggcagctgtaaccagatgccccaggtgtggcctgtgagtttgcatgctgctttgcttattagtaacaaaggcattgaaacccctcttcctcattgtgtccccaaaccacccactgggtggggtcctcaatggctgagtctacagaactcctgggctgggctcagtcttggcacctgagctccccagggaactctgccctccacggtgctcctcttcgaccctgtcagctcttggtgctctctctgccctggaagtactgagaacccagtggcaaggactaactctttcccttgtcttggactcttccctccctctccctcccccaatatagtgcacaggttctgctgactcagaggacagaaggctcctttgaggttaccctgacccctgccaggttcaagtagctgggaaactgggcaatgcttgaacccactgccacaaagtcacatgcagcaggaagggcaggggcaggtcccatcttggccccaggatgagggaatttttgaggtgggagtgagaggcaggtgcctgagtccttctacagacagaggagaaatccaaagaacattgcattaggaatcaggaaatctgggtgccaggcccaactctgtctctgatctactgtatgatcacaggtaagccaggcccctctctgggactcagtttccccatctataaatgagaaggttggttaatctctaagggacctttcagtgcccagatatagccagtatctggtcatatcttgccacttccgcttcccctcatacaagtcaccatcatcagctggtagtggctcatgcctgtaagcccagcactttgggagatggaggcaggagaattgtttgagcccaggagttcgagacgagcccgggcaacatggggagaccctgtctctacaaaaaataaatataaattagtcgggcatggtggcacccacctgtggccccagctactcagggggctgaggctggcggattgtttgagcccaggaggttgaggctgcagtgagccgtgattgcaccactgcactccagcctgggtaacagagtgagaccctgtctcaaaaaaaaaaaaaaaaaaaagtcacacagggtgaagtggcatgtgcctgtagtctcagctactcaggcagctgaggtgggaggatcatttgagcccaggagttctgggctgtggtgagctattccaatcaggtgtccacactaagtttggcataaatatggtgacctcctgggaacagaggaccatcaagttgcctagggaggggtgaactggcccaggtcagaaacggagcaggtcaaaactcccgtgttgaccagtagtgggatcacacctgtgaatagccactacaatccagcctgggcaacataacaagaccccatctcttaaaaataaaaataaacaaaacaaacaaacaaacaaaaagtcactggcatctcttgccaggattatactttccaactcacaatggggcaaacgtcattgctccctcctcccctctcccccaccatagtccgttcactcagcagcctgtgtgatctttttaaacataaggaagattgagctactccctgctcaaactccccatctcactcagagtaaaagccaagatccttaccatagccagtagatggtccgctttccacctcccctgcctctctgccctcaccccccaccactctccccttgctcattccactctgggatcactcctttcctggtagttctggaacacagaaggcacccttctggctcagatgtgttggatttgtttttccctctggaggtgggatgggggttaagggagcatgaggtgggggctctgacctaagcctgccagtctgagctcatgctcagacacagcatgagtaaaggtggggaggggaaaagagcgcgtttgccattgtcagggacagagctatgataatgcagtgccaagtgtcaggttgggtaccggctagtgaagagcaagttggcctggtgggtggggctttccttgcaatcatgctaaggggtttgggcctgggcccacaactcagtggatttcacactttttaaaaaaacagcaaagctttttgttcacatgaaatttttttttttttttaagatggagtcttgctctgtcgcccaggctggagtgcagtggcgcaatctcggctcactgcaggctccgcctcctgggttcacgccattcttctgcctcagcctctggagtagctgggactacaggcgcccaccaccacgcctggctaagtttttgtatttttagtagagatggggtttcaccgtgttagccaggatggtctcgatctcctgacctcgtgatccgcctgcctcagcctcccaaagtgctgggattacaggcgtgagccaccgcgcccggcctcacatgaaatttttacgccaaagccagcatgtaaaactgagccacccgaatctgcacggagctgctcagtggaaccgagggaaggtttccactagccatcttgcttgagtttctcaaatcctggctgcctaaattccaccccatgtttccccttcctttcaatggcatcctgcttgggagggcccacacctccctgtttgagaagtcagctctgtctggccagtcccaacagatggatgcccctgtgtcctctttgttccactctggctcttgtcaacacattgctcagcccactgacctggtgcaacaggtaggcaggctggcacggcagaaggaagcagacagaacaagtcggaaggtttggggctggtgcaggtgggagaggaggaagctattcctcatcaaacaccttgtctagaagacactgcctttcatgtcccgtgggacagaaaccattcaagctggctcaataaaaactggcttctgtactattacatttgggataaagaaaaagaaaaattggcttctggaggtagaggacagatatggtaaggaaagagaattctttagaggcttcaaggcagaaagcacattttggattcatgggatagagagcagggggatgaggttccagcgtagtgcagtctcatggcccatctctctgcacctctgccaactttcctctgtggttcttagttccattcctgcgaaagacaatccgattggctcagcccaacctatgggtgggcccttcttgggtcagtctccagctctccatgaatctgtggcggccaggagagtgctgtggagccaaccgcagggctgtcatgtgtcgctctgcagtctgggcgccacaaaggggccggctgagagggctgaggggtgctggaatccagcctatgcccaggggtggggcagcccaggggaagggatgcctgtgctaatgggtccgtctagaggggtcaagtttttataacttgtcaggctaacgggaatgctttttttctaagccatcctccaagagggggcatttttttcatagtttgttctatgtgctggcggctgctgtccctccagggacagcctcagggaaactcagctgagggccaactctctcctttctaccccactgctggagagtcacaaggcggaagggactttggccattactgagtagtgctccacctacatgttgcagacagggaaactgaggctccatcagggccccattgcaatttctaagccccagcgcaagcctctggcccagagaagcagcagcggcagtggcggcggccctggtgtggggccctgggtcacgtgctcttgctccctttgccatatttagaatcgctggatcaggggaaacttctcctcccagcccctgaggattcttggaaagagcctcgctctgaggcctggcttactgcccctccccttattcccctgcaggagaaagtaagtgcctgctctctctagaagagtctgggggcctccaggctgccccccttgtcaggaagtgcctgtcaagtctagctgaagtcccttcttcggtatcagctccggtttggggtttaaggagcccctttcttccagaaggtgatggtggccatagcttctgccctctagggaccttggctgaatggaggacagactggcctcagggtcctccagctgaggggagacagagccctgcctttgggccctggtctagggggcaaggaaagagtcacgcgctccccaggccagatgcacaaatcacttgagcttgggggttggagaccagcctgggaaaatagcaagaccttgtctctactaaaaatcaaaaaaaattagccaggtgtggtggtcccggctactcaggaggctgaggcaggcagatttcttgagccttggagagtgatgctgcagtgagctatgattgcaccactgcattccaacacaggcaacagagcaagaccctgtctcaaaagaaaagaaatcagggaaactgctggtggctgggcagtccccagacactggcagggctcagtctgggagggacgctggaaagacgagggaaggaaggaggctctggaggaaggagggggcaaggcctggatctgtatttaccttggccttggtggatacttgggggtggggagcggtcctcttctcacacaggctgcttcctactggataatcaagccttaaaaacaaacagcaacaaaaaacctaaataaaaccctgaaatgcatgtgttgagtgcctgtgatgttccaggtctgaagagccatcctcgctgctgaggataatggtcctgtgctcccatgggacccctctccaggcgtggtcttttctcccaccttcctctcccagctccatacctcctccatctcttcagatcccccaccccaccctcctgcccacttctgagagttgggccttgcctcttcccagagcagtccccagtgagtaggggctgtcggcctcctcccttcccacagcctcctcccacctacatgccttcctgtccctgtggaagctggagggatccttcctactccacaccagctcctccctggctctggatcccagcctcccatcttccttggggacttcattccattgactactcactctgtctccccgcatcttcaacttctccttcttgatctcttggctccttccactctggctctctcatcttaaaagaaaagaaaaagattccctataccctgcatccttctccagctacgatctctgatctcttctttgcagtcaaacatcttcaaattgttaaacctacacttactgtctctacctcctcactgcccctcccctttctcactttttctgggcctgttctggtcttcctctccttctgagagaaggctgcccttgccaagggacccagtgaccaatgtgtcaccaaatccagaggacatttttcacgccttatctcacttgacctcttggcagcatttgacactgttgtctactcccgctttgaaacatgttcttcacgtggcctctctgacacttctctcttctgctttccctcccagctctctggctatccctcccagtctgcgtagagggcctctgttcctgctgcaccgctggggctccatcgggtcctcctctaactttgctacaagctctctggactgtctcagctgctcctgtgacctcagtcaccacctctaccctgatgtcccccagatctgcatttccagccgggtctctctcttcatacccatggagtgtttgcccagtgcccatagccctctctctctctcaacatgcccaccacccaacacctgctcctccagtggggtctcccccgtcccatgaaggcactcatggcaccttcatccatccaatgcccaaaccagaaatagagaagttgttctccttcctagttcccgtttccagttaatcaccgagccctacttcctgcggtgttttccaacccatccactcctcttccctgctgccaccaccctgggccaggccacagtcatctgtcgtctgagctattgtggagctttcttggtctttctgctgagtcttatctcctttgatctattctgtgtacttccccaagtggtcctgagatgcaaattggactgtgtcatttcctctcttagaactccacaattggccaggtgcggtggctcacgcctgtaatcccagcactttgggaggccgaggcaggtggatcacttgaggtcaggagttcaagaccagcctggccaacatggtgaaaccccgtctctactaaaaatacaaaacttagccgggcgtggtggtaggcacctgtaatcccagctactcgggaggctgaggcacgagaatctcttgaacccaggaggcggaggttgcagtgagccaacaccactgcactccagcctgggcgacagagtgagactccgtctcaaaaaaaaaaagaactctacaatgactccccattgcctttgggatcatgttcacagtgcctgagaatgctactcaaggcccctgggtctggccctctctggtttttccactgcccccttcactttaggccacaccatccagaactgctggccgttctgggctgcctcgacggccacattcccactgcttgcacatcctgcttcctctgcctggggcaccccgacccctgtccagttacctcctccaagaagtcttcactgatccctccactttggttgtgcggaaggcttcttgggactctccccgaccccttgagtacactgtcatggcctcgtccatcccgtcaccactgtgtcatgttctgtgttgttaattccttgggacctggattattcatttctggttttacaataaacctggctgagtgtaggtgtctgaagtgaatatagcccagagaggtcaggtgacaacctcttttctgctgtgagatgccctgccatctttcctacccccatcatatccccatctctctggcctggcctcccagcagctgtccctccagggacatgttggacatgtcgagagagagagccgtggacactgggcaaacgcccagtgggtatgaagagagagacctcagctggatccagggacatccccagagaatctggagctgagctgatggccgatcctctccaccccactgctggagagttaccaagctacagggaccttaaccatcactgagttgtccccgacctttgtgtgtgtttctgacagggaaattgaggcccagagcattagtagggcccggtggtccaggtggtcttgggctcaggtcctgcgcttatgactttgaacaagtcatacctttcttttctcatttgaataacagctttattgagatataattcacatacagtaaaattcctccttttaaagtgttcagttcagaggattttagtgtattcacagagctctgcagtcaccacagtatacgcctctgaaccgccctctccttatcagggtgatgatggtacggttccatggggtcactgtgagaactcattaagaacatgcatttagagggcttggcacagtgtctggccaataggaagcctttggccagcaggagcagttatggttattacttcaggtcaccacatgagagccacctccccagcagagctttccccctcctgccctgtggccgcttctggacagtgacttgaggaggtataaatgtggagaaggcggtgattgcagttgtttaaaagccctgagctggctaataattgagtcagctgcaactgctcccatcacctaagccagtgattctcaaagtgtggtccccataacagcagcaatagtatcaccagggacctttgtagaaaggcatattttccacttcaaacttactgaatcagacactgtaggaataggtcccagaaatcagtattttaacaagccctccaggtgactctgacacccaccgtagtttgaaaaccacaaatctaagcaaaccattcactttttcatctctaatcctcttgctccctcctgaacgagtgggatagtcatgggatggggagatgggggaaatggagaggaaaggttggataagccttgtgatcagaccagctggggagagccagccaggcaacacccgcctgtctcattctgcctcctgggctgggcagggagaaagaacatgggccacaacttgcaggcagacatgatgggcaaagatgtcctagaaagtggccgctagtctggcctgtctgctggggagattagagagggcccaggccagccagcacccatgtttcatctatatttgtatagatggagaaactgaggtcccagagggggccagagagaatccttagaaagtcctttgttggatgaatgaagccacaccctagttgtggcaggcatgagaccccagctaaggggctccttcaccttgtctcctctacccctgacctccagatactgatctctcttctgctgtccctgtgtgaggaccacccccactccaggaaggccaaggcagcttgagggtcagcctgagctggggttctagctgcagctctgccactgattcactgtgtgatcctgaacaagtctatccctccctgagctctatttcctcagctggaagatatggataattattcaggtgcctggaacacaggatcttttctttttttgagatacagagtctggctctgtcccccaagctagaatgcagtggcgagatcacagctcactgtagcctcaacctccctggctcaagcgatcttcccacctcagcctcccgagtagctgggaccacagatgcacacccccatgcctggctaatttttgttttgattttttttgtagagacagcatctcacaatgttgcccaggctggtcttgacctcctggactcaagcaatcctcccaccttggactcccaaatgttgggattacaggcatgagccaccgcgcctcgtcccaggatgttttctattagtccaagtatatcccttcaaatgtaatgagagtatcaagggtatagaaactcttagccagtgggttaaagcagggagaagtgaagtttgggggctttttaagcagcgtccgccaaatggagatggtcaaggtcagaggcgttactttttaggaaagacatggggcagccagaggagtcagggatggatgtgctttggggacctcttcagtgggtacaaactggaggctttggcttggtaacatggtgttttgatgtttggttacagtgaactcctgctattcatttacttagtctttcaatagtgctgtgaaatcaatcaagcaatcggtcagtcagaataaggggcaagagagtggagatgaggccattctttcagagaggggatggctggggaggcccctccaaagaagtggcattggaacagacctgggtgaggcagaggaaacagtaaagcaggttcaaagcctggaggtggaaatatgttaggtgtgttccaggactggcaaggaggccagaataagtggggtgcagtgagccagcaggagagtgaagaaggtcaagtttggaggcgggggtggaggcacagaccttgcagggccttgttgtcagtgccgaggagttggactttccctctctaagtgcgatggaagtccgacgagagttttgtggagagcgatggtttccagctgtgcattgtgggaagatgaccctggctgcgttgaagggagtggtcacattcaggcacagtggaggcagggaggccaggtaggtgccagatggtggcggcttggttgggatggtgcgacctggcctgcccagggatagattctgaaggtagagccaatggaatttgctcagaaggggatgtgcagggggagggaaaggaagaatgaaggagcctgagccctgggggagccgtggtgccgttactgagatgggtaggctggaggtgaggaggacttgaggacaaattgagaactggtgtttggaggtgttgggtttgagaggccaccagacatccaagaagagtcattgagcaggcatttggacacacgagctggacacctgggagaggctgccacatcctcactcctgctaaatggcagaggcgactgtggtcaaggggtggggcaggatccaaagtgggcttttcttgtttttgtttttgtttttgtttttgtttttgagacggagtctcactctgtcgcccaggctggagtgcagtggcgcaatcttggctcactgcaagctctgcctcctgggttcatgccattgtcctgcctcagcctcccgagtagctgggactacaggcatccgccagcaagcccagctgatttcttgtatttttaatagagacagggtttcaccgtgttagtcaggatggtctcgatctcctgaccttgtgatctgcccacctcggcctcccaaagtactgggattacaggcgtgagccactgcgcccggccttttttttttttttttttttttttgagatgatgtcttgctcttgttgcccagactggagtgcaatggtgccatcttggctcactgcaacctccgcctcccaagttcaagtgattctcctccctcagcctcctgagtagctgggattacaggcgcctaccaacacgcctggctaacttttgtatttttagtagaggcggggtttcacgatgttggccaggctggtctgtaactcctgacctcaggctatccacccacctcggcctcccaaagtgctgggattacaggcatgagccaccgcacccagcctgcattttaaattttatattagtttgttattaccgaaacaacccatgtttgttccaaacaatatattaggaaatactggctgggcgagtggcttacattgccagctctgggaggcagaggcgggaggatcacttgagcccaggagtttgagaccagcctgggcaacatagttcaaccccatctctacaaaaaatttaaaaattagccgggtgtggtgtcatgtgcctgtggtctcagctactcaggaggctgaggtaggaggatggcttgagctcaggaggtcaaggctacagtgagtcgtgatcatgctactgcactccagcctggttgacagagtgagaccctgtctcaaaaaaaaacaaaacaaaacaaaaaatagaaaatacagataagcagaaagcaaaacaaaagccaaatcacttaattttaccacccatagataagccttgctgactctgggtacgtgtgtaaaaaccatctctgtttcaaacattgggatcacattgccgttaaggttttataatctgctttcctttttttttaaattgtgaagtggaaattttatagatgtgtaattactgacatggcaagaaaagtgttaatgatggccaggcttggtggctcacgcctgtaatcccagcactttgggaggccgaggcaggtggatcacgaggtcaggagatcaagaccatcctggccaacatggtgcaaccccgtctctactaaaaatacaaaaattagctgggcacggtggcatgtgcctgtagccccagctactcgggaggctgaggcagcagaatcgcttgaacccgggaggcggaggttgcagtgagccgagatcacaccactgcacttcagcctggtaacaggatgagactccatctcaaaaaaaaaaaaaagcaaaaggaaaaagaaaagtgttaatgaaacattcaagaagaagtccccagagtggcccactgctgcctgagcttctgaggtcagctgagaaacgggactggagggtgtctgtcaaggccggggtaaagtcttaaaaagtcctggctgtggccattccccgaggagagggctgcatgagataacctcatgaaggacccttctggtcctaaaccctgcttcagctgcagtcccgatgcaggtacatgtggccgctgccttttttgtgattaattattgaacatgaggagctggtgctcttctcttctgttctcccgtaccccgtgtttttgctgactcagctctggtctggaactggccgaggaataagctcttctcgaactcattcactcataacactttaccgacatctgccacctaccttctcaaaccaggggtatttgctgggatacacttgccccccaaaaaggtcaggaacccctgtccaggaggtgtaagtgagccagggcagtgccacgccctttgcatgtcttccttccatagcccccacttcatagataacgagatggctcagagaaggcaggtgacagtctcaaaaccacacacacaagcaggactgggatccaaactcaggtctctctgaccccgagctgctgtccttaaggtcaccacgaaacatgaatataaataaagccacatagaaggtgacttgggccacacatagggaggcaagcatcgggagttggcagttctgaaggggggatagtggggtgcgggaatcagaggctccgtagagctttgtagcatttgtgttcctgtaggcgtggacgatgagcagagtctcgcaggcacagacatgaggtgttctgcgtagcatgcaccgtgccagcaacggtgcagaggtggggagactggggacatctgggaaggctggcgggtcagtacacagagatgtatttccagagaagcctgttccctccggagtctcctccagggtgtgtgcatgttcagcacacccccatcctaaagaggggtgctcctggaggccacctcattcgcctctgctgtgtctgcagcctgtgacctctcacctcgctctccttcacccatccacataccgcaaggccaccagtttctctcctcatgcccttggtcctcttcccatccactgggaggttgggaaccctggctctaatctcagctctgtcctgggcacactgggcgacaaagggtgagtccttcttcctcttcgggcctgtttcctcgtggtgcactgggggatgagggaagtattggatgtgctagggtctaaagttccttccatttctatgtctctggttctgggccactctgtagtttcatgctgtctgcagggaagttcctggcctcgatggcccagctccacactgcccaattcccctccctacatcctctccctgctgcatcattccttctctacctgtcctccatgatcctctttccttttctagctgtctcgttacttaattccacgaaggcaggggcagttgtcccaattctgcagatgaggccaggctcctgccactttggagtgcataagaaagaaggtccctccttcatccgctgaccttccctgagccctgggctgacctctggggcacttctcccaagacatcttaaaaccaagctggggccaaggccaccacttgtggatggctagacctggaggaaccctgagtcagtctatttccactgccagacctgctactcacagatgagtgactacctctctgagctgcagcctgcagcagggggcaattgagatagttgtgaggtccagtagcttggggcttgagggctgctgcctttggtgcccagcacagagctgtaactccagggaattccaattctgatttccacataattttctgaaaataatgttctcctctcttggctctgtaaccccctgccaggggcaccttggctgtcctgtccctccaacaatctaaccctctccctcatgttgtaattgcagatttttgctggtcttcagctgcctggtgctgtctgtgctgtccactatccaggagcaccaggaacttgccaacgagtgtctcctcatcttggtaagtgctgggagtccgggactgaggggggctgtgtgaggtagcacctctgggctgggagtccgggactgaggggggctgtgtgaggtagcacctctgggctgggagtccgggactgaagggggctgtgtgaggtagcacctctgggctgggagtccgggactgaggggggccgtgtgaggtggcacctctgggctgagggctgaaggtggaaagaggcttctcataccatggctcagagagcagcttgctgtgctgtgttccctcagctgtggctgcccctctctgggcatcatctccactttatagcaagtgttgggggacctcctgcctctatgcaagggcttatgatgggtccagaatagaagtgagtaggctccaccccttctcaggacaaaatctgcaaactccacgtgtggtggattttaggtcagtttttgcctaaacacaaaacaccaaatggaagcccctcagagggagacagctgacagccagcaaccccttttgtcaccaggtcagagttagggagtctgagacagctgggacagggagggcctgttgaggagcagaaaaatccgatcagttcatggggaccggaaggggaggacacactagggcttttagtcttcttgcaggaggcggagggggccacctgccctccggaatcgtcaagtccaggaaactccaggagaggggtccgaggaggccctggtccccctaacccagggactcttggctgggtccgcgctgtgacctgggccccagttctggagactgaggaccagaactcaggcccctggtcccacaggaattcgtgatgatcgtggttttcggcttggagtacatcgtccgggtctggtccgccggatgctgctgccgctaccgaggatggcagggtcgcttccgctttgccagaaagcccttctgtgtcatcggtaatgaggcgcgccccgcccgacctgacccctgaccccaggagccagggtgacgcctttactcccaatcccgactctgaccctggagacccgcacagattcagcggaccctccccctccctccccagtcccctgccacatccccagaagtccccgcctccgggtccgtgcgcggggtaggctggctgtgatctcgccgcccccgcccctgcagacttcatcgtgttcgtggcctcggtggccgtcatcgccgcgggtacccagggcaacatcttcgccacgtccgcgctgcgcagcatgcgcttcctgcagatcctgcgcatggtgcgcatggaccgccgcggcggcacctggaagctgctgggctcagtggtctacgcgcatagcaaggtgaggcctgcaagccgcgcgcggagacccgagggcgtgtctggggcacgaccagagcgggcagggcggagagggcgaggtcagaggggctgtctccgtgctgggaaggggtgtggcctgcgggggttggagccctagcaggaggcgaggtctaagcgggtggggcgaagtggattctgaattaggtaggggcgggcctaggagtccggaccggatcagggggcggggccggagaggcggggcttgagggtttcccctggatgcttctgggtttgaagggaccactcgtaccacaaagtgggcagctgaggtgggacttgagggtggggctggagcggggctagggtgggccccaggtggaagcctgaaagtgggacttgggggacggggcaaggtaggccgggtgctggagtcctgagcctggaacctggagactcaaggcaggcggggtgagggtgggggtgggaatgggggtcggggtagggggagtgctggcggtttcgcgaaggccggggcagggtcgccgtgatgggaggagctgagaaagaaaagcgagcctgggactccgggagatgggggacctttatccctttcccgtgtggaagccccccacatctcccaggcaggcacagcgctcctcaccgcgcccctccgcctgccccgcaggagctgatcaccgcctggtacatcgggttcctggtgctcatcttcgcctccttcctggtctacctggctgagaaggacgccaactccgacttctcctcctacgccgactcgctctggtgggggacggtgcgtgagggtctttgtagggctgcccttctccctgggatcctccctgggaacttcccgaggtctgcccatcgtgactcctgactcagggttgagcgggcctgcccctgccctctcactagagctgggacccccctgagaccagccccaatgctaaccccccaacctgctctggtggacctgcctctgtccccagctagccccgcacatcaagaccttgtgactatacccctttcccctgaccagcccaggagagggagaatccatctatgaccctaaccagcccccgtgggtgaccaggggccccttccctcatgatcaggctcctacctgcctgtacccccaacaagccgtaggtggcccccgtgaccagtcctgcctgtaacctgtttgtgtctccagattacattgacaaccatcggctatggtgacaagacaccgcacacatggctgggcagggtcctggctgctggcttcgccttactgggcatctctttctttgccctgcctgccgtgagttgcctcctgctcagttggtgggggaggctgagggtgggacctgctcacccctgtcacacatttgcctggggagcctggggtacctcagaggggcaaggatggggacacccttgcagcctcttactgccccaccactgccagcacattcccccaaccatgccctatccctctagggcatcctaggctccggctttgccctgaaggtccaggagcagcaccggcagaagcacttcgagaagcggaggatgccggcagccaacctcatccaggtacaagatgcccgggaagaagccctaggagcagggccgtgtgactgcactggtgtgtcaaccctgtgtgctgacccatgtccccagcccaactgtgacaccactttgaagctcaaaagggctatgtgactttcctggagccacatgccaagtcacacacagagccaggatgctcactgacagtgccagaaacttccccctgcaccaaatgcctggtttagggctagccagaactgccctattgcccaactccagcccaacttcacagggcctggggaggggcggagcccagacaggagctgggaggcctctggtggagacccactgctgcccccatcagctgtgcagcagtaagcctgccccacttccagcaccttcattcattcattcattccacaagcactcacacaaatgaagagaggatggtgcagacagggcttttaggaatctcaacatttagcaggtgggtgggcctgcaaagttgagctgggcaaggagacagaaggaacagccagaggggtgggtaggaagccaggagtgtgtggtctcagtttccctctgtgccatggcgtgttgtgactgtgtgtgggctgaggccagggctctgattttctgtgaccctgggactaggccttggctttttctagtcaggggtgtgtgtaagggaactccttgcaggaaatgcttcagggaatactggcccagtccacctctgcctgctccctagcctgtcaccctctgagccccaaacccaagcctcactcagcccttccttatctctcctccccagggtagaaccctcctccctgtcgctgttatctccagccaccagctcagccttttcttcttagcgtcccttggggcacaatggccactgtcccctgggagctggccttctgaggggcattgtaggggcaggcggctggcactgtccatgccaagagacagctagtattgtggtgcccataattaatgagacagctctggcagctgctccccagcccatgccaggggcctaggcaagcaggaagtaaaaatattcctgtcttaggagggtgcctggctggtgaggtcagcagtggcagccccttaaggacaagaggcatccaaagaagggaggcgtccagggcccagctctgccttgtcctgcctagcagcctccatgcctccctgctctcactgatggccacactcacagtccctccctggctcttcctacgtggagggagagggacagtctctcctcctgtctgactttcatccctcctgctgcagaggaagctcggcaagcccatggatgctgaggggttggtaggtaatgcttttcctcccctctcagtccttagtattcccatgggcagtgacaggcagctgggaaagatggagtggcattgctagtaataataatgacattctgcaaacatttgcaaagcacccacatgtgccagacactatatttgcactgagaatgcagcggtaacaaagacacagcttgcagtctagggggagagaaagttatcagtcaaatacacaatgaataggtattcatcaaatgtgataaggggaataacaggagtgtttaacagaggaacctggcatgaagtgcctactatataccaggcactgagcttggcatttaatatacaactgttcatttaatcctcacaacaccctggtaggcaagtagtgttacatgcgttttacaggtgaagaaactgaggtcctgaagctttacttaatttgtcctcactaataaggggcagagctgggattggaaacccatgtctgcctgacaacaaaactccagctcttaacctctatgctctatggcccctggctctgacattgatctgctttgtcccctcggggaagtcgtttctccctaggccttactttcttggctgcccctgtcagtggctgtggaattggaactggcctctggctctgggtaacccacaactggaccaaggactgggttctttcaggggagagggctggtggggactgagaggcctcactgatgccccatcccccacgtcccccataccaccaggctgcctggcgcctgtactccaccgatatgagccgggcctacctgacagccacctggtactactatgacagtatcctcccatccttcaggtaggtcctgctgggggtgggggtgggtggggggctggcagcaatgccctttgaggacaagtggctgagactcaaccctggagggtggaaagggggtgatggctcccaggggagcaccctgggctggctctgcagatcctatgtaattcagagcctggagtgtcctttattccactctgctatgcccagggaagaggtggatactggacatagggcattggtgaagccctgccccatggctgaaccccggccctggagtgctggcagtgtgcatgctcacccataggtgatgccatctagggcagtgatacagccagctcgtctcccctcagtcctgaatgggggacagagttagtggatattgcagctggttggagaaagtgtgggatgggcagaaacatgtgttccagacttaggtgcatgctcctaccctgaacccccatgtaggaatatgtgcccacttttactgggccagtcagcagcctcagggcccagaagtgggtctgccccactggcccgggccaggctaagactgcatgggggtggcaccaggagagggattattaatagcatcacaaaggtgcgtgtggccaggtgcctggctaggccctcaggcaggaatgaaaaccatggagcccagctcggtcccacgggcaggcgggcatcaagcttgtggctggggcaggatgctgtgctcagcgcttctgcgggtgccttttttgcctcattagttctccaggagaagctgttgcgcgattccactcgcctctgcacctggcttccccatccctgcgccctcccagccctaggggcttcccaggggagaagcaggagagaaggggccgggaagaggggctcccagcatcacactggtgcccccacatctctccacccggcagaggcaagctcctacctcagagtgggaaggtgactagattagaagagaggccttttgttcaaggctgggcattcgagagtggggcagggctgatttgtaagaaatacaatgtgtatgagggaagatctgggggtgggggtggtcagatggtctaggacctctgcccagaggaacagagcctagtctggagattctggatccactgggcatctgctccctggaccttagtttggtcatccatgcaatgggaaggcaggcaggagagagggaagataccctccttggctcatggcagcagaaaatggcctggagagttaggaagaagccacggtcccgaatctagtcttcaaaaacccagtggcaagagtgagtgctggaggggaaggaagctgggctagccaccctgtcacaccgccctcctcacctccatctccccttaaaatccagagtcagatctggagggaaaggatgtcagggccactgctggcctctctgaggaggcacggcacgttcaggcagtcagcttgatgggctgagagtaagctccttgcacggctgcccttgagctgtgccagccttcacatccatgcttggcatccctgggaactgggggtagaaagggagtggggaaggccagtctcccactgtccaccctgtcctattctggccgggctgtcagtgaacacctctagagcagcaggacctggcaagatctgagctcaggagctctgtgcccactgggtgaggggggtggtgccatggccctgcctgccactgatggtgccctctcctgcagagagctggccctcttgtttgagcacgtgcaacgggcccgcaatgggggcctacggcccctggaggtgcggcgggcgccggtacccgacggagcaccctcccgttacccgcccgttgccacctgccaccggccgggcagcacctccttctgccctggggaaaggtaggggccccgtggggctgccacctcctcttgcttctcctcctcttcttccattctctgtcttcatcctctctcagacctgccttcagccacttcgtgggtgtctgggcctgtttgggggactcctaggccgtcagagggccagacaggtacagactgagggcctctctggaggggtcaggctggactcacctttttgtcctgtggggctctgagggtctgagtgggagagatgtccatgccatcctttcccatcatctcctccgttcatggcattgtcctctttctttctctgttcccacgtcccccttactcctccatccctgcacccccatccctcccgggaagctggacagaggaggaggccactggccacaggtgcttacggctcaggtaatcgtgggcaccatcctggggtgtgagggcagggaaccccctcccccggcatgttgctctaggagggacttagtactgaactcgcctcttgggaacgagatgccagctggaaagagagctctgtgattaagacctctgtaggacctgcgtaaactcagccagtgactaatgttcctttcttgtgcagcccttgtctgcaactttgctaatcccagagggtcctcttggggttctgtttccttccttactgaggtacactttggcgctcccagccatctctttccccttgaactgtctctcctgaagctttttacaaaatcttgaaagaagaacaaagaacaaacaatgcttacccccacataaacgttcctaaagagaagaatttcaggcatgtttggataagggaagcccgtccactcacagcatgggaaagtggctgctcttgtagaggtttagctttgaggtcaggggttaaatccccctcattctttttccctcgtcctttacccatctctttgttttgtctcatcttcacacatcacccctgaaccagccaaatggacatctggcctttgagcttcaatgtcattctgagccccaggcccagaacaaagaataggagaagaggcgagccgcccagtgatcagcaggggaggcgtggtggaagctcgcctctgccacccgatgctgtgtgtcctggaggaagccttcagtcattctgaacctgtgtgtcctggcggaaaatcggcagtgtttaggctgattggggctctgggtactctagagtttctgggctgaaaaggcctagggaggagttttggtgcagaggatgcagggagcagcctcccttccttgttctcagtgagggcacttctgggccaggggctgaacaggaagtgggtggagagggagagtccctccaggtctggggctggagggaggggaagcgtgactgccaggccaggctgagagctccctgggagagtagggcccctctcagattctctgcccgaaggtccctcattgttaccttcatccctaccaaacatagtttccaggcggaaactcaagagtttttgtatcccagcaatcctgtccaggacctgagccagggctctctgtgcttccagttcactctggtctcattttgactgaataggaaggcaaggggaatggacattagcctggggcctagtacctgtacactccccacggctcctttggtccctgacacccccagggcccaggaacagattactactaagggcttggctgtcactgactcccagcctcgtatctatctgcctgggaggggacttggcgagtgtctgggacacagggtgatggtagtaaagtggccctttctcccagggaccccagggggctgagccatggtttgtagatcagtcaccaggctcaggcccaatggccgtatcgttaatcgtggctgtctagaccgccagccaggacacccttcctccaccaaaaacacacacacatatacacactcggttggccacacctctggtggtgcttggggatggacctgggccaagtgtgcccacaggaagtggtgctaaaggagcaggatttcctgggggatggcattgccagggccagcacctctcctcttcagggttttgcaatgagtttatcaaaccatggtctccagacctcctgcatcagcatcccatggagtgtttgttcaaaatgcagatacctggacctgtctccaagcccacaggatcagaatctctggagaagagacacagccttctgcatatgtaacatggtccccaggggatccctatgcaaagtgtgagaacatctacgttctggtgatggggctggaggatgatttaggtgggggtccttctttcccaccagctaccggaggccggccccatcccagcagctccccacactctgcccacagcccctttcccgctaacctctgttcgtgtcttattctcaaacttccagccagatgtttaataataaacggagtttctttcggatccacgccagctggagaccgaggtaccccctcgcctgctcctcctgtccccactcctccttgccccacccaatttgggggctggagaggggacaggatgggccaaggacaaggtgcatgtgcctgccgcctgccgtctgccttgggtgcccagtgaacccctcgcctttctgggatgcctctgctaggtctggggcatgggcccagggtgccaggaggggcacgtgcaggagccttaaggatgtgtgctggctctgctgctgatgccctctgtgatcttggccaaattgcttcccttcttggacctcagttttccgtctgtggaatgggcagattgaactagaggacctctgagggtccttctcactctgacttttgccaggccttgggcttagctttctgtctccctgctacccacctggggacctagcagatgcctgaaggagctgggtttggcacctttgccagctccaggaccccagctcttttagcggcatctccatggcattccttggtacctgccctgtgccaggacttgctctgtgcactagggacacggtgatgaataaaacatcgtcctcggagagttgcaaagagtaattgcagctcagtgtgatgagtgcaacaaagggaggaagcacaggggctgtggagcccgggtcaggcacacaacccagaggaagccctaaaagcagtgggtttcagggagggcattccaggcagtgaagcagcacggacccaagcaaggaggcaagagggagcacagtgtggggaaaaaagctggcagcccagtttggcccccctgagactggacatcagagcgaaggttgggggcagagctgggtcatgcagaacctaaaagcccagtgtgagcttcaccctgttggcatgcttggcagcctgagctcatggagtcctgggtttccaaaggtgcctctggggccctgtgggctggggtcccggagctaggagatgagtggcagggctcctggctgcccatgtgtgcttctgctgagaggtgttttttcctagaaacgtgggttctggaccacaatctagctactacccactattcgtgtgtccttgggcaaatcacctgacccctttgcacctcagtttcctcagatgtaaaatgcagatgtaaatagggtctgcttccactaaaactggacctggctccaataaatattggccttatttgatttggtatgttcagcagttaagatcttatttaccttaaaagaaaatagcttagaaaccatggctgtgggcaatggtttgagctgaagcgttgagctaaggagtctctgggtcaggcccgccattttgcaagcctcctttggctgtggagggtgtggacaggaaggacacagccatggcagaggccagtggcgaggctgtttccatagtccctgaagaggggctgtatgtggcttcagaagtcgtaggctgcctctgttcccccagtgagagtggccctgggagggcagatcatgaggccctaaagaaagtccttgtggaagtgagttcaaggggttgggaccagcagggcagcctgggcagagctcggcctccccagcagggcagccacagtccagcccaccccatctttctcccaggtaccaacagatccttagccagagtttcttgaccttggcatcattgacattagataattctttgtggattgcgactatcacatgcatggtaggatgtggaacagcacccttggcctctacctactagatgtctacctactagacattgccacatgtcccctgagtgggggaacttgctccagttgagaaccactgctctacaccctatcctgattgcttgacccagaaaaagaacatagactctgaagtcagagaaggctgggttccagttcttgctccatctcataggagctctgtgaccttggccaaatcatctcacctctttccgtgtatataaaatagggatggtaaagaccgcccaccacacacagtggctgagagaactgaaagaactaaggcagcctgatgggaccctgcacgttctgggagcctgggaggggaaagagctttttggtgcccactgtgtgccaggttttcttccaccttcttttagctttcagacttagaggagctgatatgagccattttctgggccctgcccaaggaactggaatccagacccactcctgggaaaacagtgccttcttgcattaaaaaggagctcagggcctctggctggctggaaacttacagaaccccacaaaccagactggaagcttcctcaaccatcacagaatcagagctggaaagggacctttcaaggtctctagtgcaagccctcgaactccttcctccataagtcctgctgagtgcaagctcagccttgcttgcattacttcttttgacagggaggttgccctcttctccagaacgccattggagccttatgtggtgggcgcagtgatgtggagttccaggcccttggccaaagtgtcagggccttctccactctcctctcttcctctccctcttggaggagtggaggacaggagaaggggttgcacggaccgggcagggtggagggtgcttgccagcatgagggagcctgcaggaatggctctgcagaggaaagtttgggagagccaacctcaaactttgattggaatctttgggatgtgtcgatggagtcctgggccagtggagagcatgctggatagtgggaactgggaactgtccctgtccttttgataccctcagggcccccatccttgacctattaacctctcccctctgggcagaggccgccacccctaaggatggccctacatcctggccaccttcctgaaggtgcccctggtttcgaggtctccctcacttcagcaccttggctccctcccctccaccccatgccctgggcatgggagaccccagttcccacccaataccgaaaccagaatctcttctctgctcaacccttgatctgaaagcctctgagagtaggtgacacggtgtcctcccccaactcctgccccacttcaggtctcctctaaggctggctggtactctcttgatctggggccccagacatttggggtgggtccccctgaacccgaacctgaacctgtcggaatctctagtggcaaaccacagcaggggaggcagcgatgacgtcacagggcatgggatggaggacatttgcataggtcctaccccaacagccataacattgtccttgaacctcttggacacagagttactctaccagatcatggttaaccagggcttgtcctggggaatgaggcctctgctaacttgttttcctccaacgtttggggaacgtggtggggagttggatgcgggaagggaagtctgagtgcatgtgtagacgtgcacgtacacgttcacatgcacacagactgtgtaaatgctgttgaaccgggagctcagtaggcagtatcggggggtagatctttagcggggatccaagaccacacaggcaggatgtcaatcaaggtgggctgaacttaggtaggagagaccacagaagaacatgttatcaaatagagaccctcactgagagggcaggcaccaggcatggcctgggcatacatgtgggcccagcagctagaaccatggggccgaggccctcagtaggccatcacgctgcacacctccagggcaccactgcatggaagtctgtgtgatggagtccttattttgcagtgcactgcctgcacagctgtacgaggccctaaaaccctgaccagtgtgggatcagatagccgcagcagtggggagtggaggaaaatatgaaatgacacatgtaaacacacgccaacatatgtacacacaccagtgcctgtacacccacactcgcacatgtgtgtgcacaaggtgtgtgtgtgcatgcgcgcacacacacacaccctcgactccacacagcctgcccctgtgtacagtgaggactggaggcctacctccgtgtgcatggccaggtgagcttccgaccctcagcagcctgtctgtgcccaaaggggtcgccacccccaccctctgcccactcacctgcgccaggcccagctcccacatcctcctgtctgtgtctctgactttggatttctcccactccttccactctgacatctgtctcctgtgcaccccttatctgtccgggtgatgaggggtgggatgtgggtggtggggagaggatctgcttcgactgaccccgaatcagcctcttgtaggagtgagggcctcccttaccacatccttgttccatcccaagaagtctccgcttggcggggaatccagacctaatagccacccccaagtcctaagtcagctttgtccccactcacccccacccccagctctggctaacttggctctctcccaacctgcctgccctgccagcagccggatgggcatcaaagaccgcatccgcatgggcagctcccagcggcggacgggtccttccaagcagcatctggcacctccaacaatgcccacctccccaagcagcgagcaggtgggtgaggccaccagccccaccaaggtgcaaaagagctggagcttcaatgaccgcacccgcttccgggcatctctgagactcaaaccccgcacctctgctgagggtaagcccccggggggctgagtccgatcgagggccggctgagggtggcagggcggggacagtctgggctgggagcagaaagatctggctcgcgtctcagctctggaactgatggaccgtctttgggctctggtcttctcatctgtaaaatgggcattataatatttgctctgctatacaatggacatcagactgtttgggaatcacgtggagggtggcatttcataggggttagcagcacaggctttggagcgagactgcctggatttgcatcctggctttgtcacttatcttaggcgagtgacctaatttctctgggcctcattctcctcattcataaaatgggaacaataatagcatccacttcctaggattattgtgaggattaaatgagataatccatggaaggtgaacagaagacttttgggaatataggaggtgctcaacaaatagctaaacacaaatgtactttggaagcggcaggaatgcatccttgatgagccctgactatgcactgcccagcactggcttatctcatttacttctcccagtgaccctggaaagtaggttctgtttttgtccccactttacagacgtgggcactgagatctctcagcttgtgagtggcagaggtgctctcctcaagcaggtctattcagctccaaagcccaggccttcttcctacccctcttcacccagcccaggctgcaagtatgagactgtggaccatgctgatgtcacttttctgagttttggctctgctggagacttccactgtgatttaggcaggagactgcccctttccatgcctcagtgtcctcttcaggaaaatgagagggttggaccaagccccctggaagacttctcccagctttgacatactttaggcccctgggtggggagaggtggggtgagtgcacaaggatgggggatggggacagctccccctttggccttggagggaggggacccagccatgctgtttctgcctgtgctgtgtcagccctcaagatgctgctggctgacacctcagagtttacagaaccccatagaccagtctttgagaggtgctgcccatagaagcctgggcacagctggtgcccaggacctcccttccctgtcctggaagctgtccgggctcttgccactgctcctgtgaggcaaggacagcatcacctctctgcgcaacacagggcactagcctcagagaagcttctctcattcagggaagaatggtttgttttaagggccttccctagtagcagagctgggcctgggagccagccacttgggtgtccttccatcttagctgaaggagaagactgtgtgcatgattacatgcagtgccatcaaaccccttatctctggggctcactgttctgcaaggtggaaccagtggggcttcctccagggctttgtgcaacaaacttgccctggactaggccagctgtgccctaaagcagctcccacctacccaccaggcagatgtttaccctgactggccaccggggcagatgggcatgcaacacactggggctttccaccctggggagggcagtgagacacaggagccccaagaaggttctgagccctttctgggcctctgtcttcctattggacactctactggtggtttggcatacaagggtcggatgggaggttgggagtggcccctttggtgggccacttgccccatacctgccttttcagatgccccctcagaggaagtagcagaggagaagagctaccagtgtgagctcacggtggacgacatcatgcctgctgtgaagacagtcatccgctccatcaggtaagactgaggcctgaggcgagcacccccctccgtgtgccacccactgctgctccccatctgggcgggtggatcacttgaggtcaggagtttgagaccagcctggccaacatggtgaaaccccgtctctactaaaaatacaaaaaattagccagacgtggtggtggatgcctgtaatcccagctacttgggaggctgaggcaggagaatcacttgaacctgggaggcagaggttgcattaagccaagatagtgccattgcactccagcctgagcaacaagagtgaaactgtataaaaaaaaaaaatgtattttttatggtgggtcttggtcaaaaaagtttgaaagcccctgctctactggctgtctccatgcctcaaaaattaagcagggaccagggtctcctaggccacggcctaggcatggatctggcctccaagctccttggtgtgccgtcctggcctagtctccatctccagcctgcagctctagctccagaaaccccctcaacctccaagttttctgggctccccactttcttccctggctgatacacctgcccacaagcctcttttcttgtattccttttaaaattagagtcaggctgggcgtggtggctcatgcctgtaatcccaccactttgggaggctgaggcaagagaatcacttgaggtcagaagttcgagaccagcctgggcagcatagtgaaatcttgtctttgcaaaaaaaaaaaaaaaaaattaaaaaattagccaggcatgttggtgtgcccctgtagttccagctacttgggaggccaaggtggaaggatggcttgagtgcaggagtttgaggctgtagtgagccgtgattgagctactgcactccagcctgggtgacagagtgacaccttgtctctaaatagataaatagataaaatcagagtcagctggacctgtccccactaccccccacagtctgaagcctctgcttacccccttttcacccatccattctctcccctccatgtgcccagtgtcaaggacatagtacctgacctgccacctgacccaagccagctctcctgggccaccccaccgacctctcagccagcatgccccaaacctgctcctcttcctgggctggttcccatttcaggcagtggcaccaccatccacttggtcacccaagccatgggagtcatcctggactcagaccagggagactttcagccccacctcctgaactgctccaagctcttccatatctcctcccccatcccctaaagctagtttccctgcccacgcctctgcccctccagggtattctccacacaggctggcagagctggcatgctaaagcagagtaactgagccgggaacagtgggtcacacctgtagtcccagcactttgggaggctgagacgggcagatcgcttgagtccaggagttcgagaccagcctgggcagcatagtgggacccccatctctttaaaaaataaaaattaaaaaaaaaaaaaacagagttattgatgtgcctgccccacaatgtcccattgcccagtctctgccagagatgcagggctcttcaaagcacaccccagcctccttctcgaggctgatctcctgtcttctcataccatggcaccctgaaccccatcctccaccccggctggttgattaacccctttccatctcatccctgtttctgctacttggaggtaggggaggctgggagacgcagcagaggctgttcatggtggccaagcaggaggtgccctggtgctggacaaggggatagcaaagagatggagagggtgctgggaaagaatccctgctctaacaggacactccctctgagccccctcccccaacaggattctcaagttcctggtggccaaaaggaaattcaaggagacactgcgaccgtacgacgtgaaggacgtcattgagcagtactcagcaggccacctggacatgctgggccggatcaagagcctgcaaactcggtgggtgcaccgggcctgttgggaggcaggggcagggaggcagcgaccccagccctgaatgaagtctgaggccaacccccgagcacccccaagggctcactgctgcagctgagtttctagactgaggaggtccctggcttgcagtgccagcctgaggccagacccagcacccgtcccaaggctgagaaacaacccaaccatagtttctctgtgaggtgggtcctctgtgcaagccctattgactcatatgccttgggggctttgtttagaatgactgtttcctggtcctaaaataatcagcctaaaataatcactgacctcccatctcccaagagaataggcaaattgtcctcactgcccacctcttgcctctggaatcctcccacatctctctggtagacccagcattaggaagaatcctcaccccaagacccacatcacctgcaccttgcccttctcctcttctggcctgcattttcactgtccactcattcatttaatcactcgagaaatagtcagtgggcatttactacttgccagcctgtggggatatggcagaaagcgcagcagagttcccacacttatggagctttcattctagtggaaggagaataagtgataaataagtaaaactggaatatgtcagacaacgataaatactaaggaggaaaataagggtcaggctgttagggtttgcaattttaaataggtgagaaggttctagagggaacagcaagtgccaaggacttgagaggggcaagtggctggagtgttggcttcagcacagcagggagcctggtgtggctgcactggagtgagaggtaggaggtgaggtcagagggctaacggcactcagagagtgtaaagtcctgtaggcccctgcaaagacgttggtgttcatccaggatgagctgcaagcattggagggttttgtgcaaacgactgacaagatctgaattgtcttttaaaaggatcaccctgggtgctgtgttgaggatggacttagcggagtgagggtggacacaggtagaccaatgagaacctgcttcagacttccacgcatgagaccgtggggacttggaacagagtggcagctgcagaggtgggacaagtggtcagattctagatacattttgtaggcaaagttgacagggttttctgatggggtgttaagagaaagaagagagtcaaggatgaagctaaggtttttggcttcagcaagaggaaaaatcgagttgccatttgttgacatggagaaggcaatgaatggagcaagtttcggtcaggagatttgggaggtgccgggtttgtgatgcctatctgacattcaagtggagtgttgatctggcagttgaatagagaagtgtggagtgcagagcagaagtacaggatggagatgaagatttggtgtcgaaagtgtagaggaattgaaaattatggatctgaagacatcaactagtgagtggagtaaatagagaatagaggtcccaagagtgagccttggatcctgcagtgtttccaggttgcagagatagaggaggaactaacaaaggagactgtaaaggagaggtcagggaagtaggaaaagaactgggagagggtggtgtttcaaatgaagaaagggtttgctggaagaaggggtgatcagatgtgttgagtgctgctagtaagtcaagtaaaatgaggacaggagttgatcaatggatttagcaacatggggttatttgggagcttgacaacagtagttttggtgaaatggcaggggtgaaagcctgactggagtaggtttaagagagaaggggaggaaaggaattggaggtagaggatagagataacactttcaagaattttgctgcaaaggagagcagaaaaataaggtgaggtcagttctagccttgtccacccaccttaaaagtcacattcccacgtgtctccactcctcccatcctctttccccttttccccaatccatcttttcttttcttttcttttcttttttttttttttgagacagtatcttgctctgtcgcccaggctggagtgcagtggtgcaatcacagcgcactgcagcctcgacctctccggctcaagtgatcttcctgcctcagcctcctaagtagctgggaccacaggcatgagctaccatgtccagctaatttttaaaaaattatttttgtagagaggagggcttgctatgttgccaagtctgtctcgaattcctgggctcaagtgatacctccctacctagcctccccaaatgctgggattataggcatgcgccactgcgctgggcctcctagtccactatttccattcctctttcaccagacggttgttttacttgtcaggttcgtgtgtggtgcctttgcttggccagtggagaaccaccagagcaggggccagtccctccaccctcaactcagcctccatctggcagggcaatggccccttccctcagattgcctgtcccctcgtggtgccttctccttcatcaggcaacctataattcttgtggaagggagggacggcgtgtccccgggccctctgatggttcccttacccttagggtggaccaaattgtgggtcgggggcccggggacaggaaggcccgggagaagggcgacaaggggccctccgacgcggaggtggtggatgaaatcagcatgatgggacgcgtggtcaaggtggagaagcaggtgagtgtaggatggggtggcggagctggccataccaagaagctctgggggccgcggtgacatggggaggatgcgtttcccacagccacagcccaagggtccccgagaagacctaagagccccctccccggccgaagcccccgccctcgccgccagacattcccataaacccgccctctcctgctaagccccgcccccaggctgcataagcccgcccataaccttcagataagcctacctcagttccccctactccatttgaccccgcctctcagttgtcgctgtagctcgcggactatccccatcggtcacacctaaccaccccccgggttatgcaccagtgcccagcttcgcccctcgctctagccaagctccacctttccaggcgggatttgtgcttcccagataagccccgcccactccaccggctagggtccgccccgagacccaagccccgcccccggccgcgtcccctccggtcccaggccctgcttcccagctgcgccccgtccccaggtgcagtccatcgagcacaagctggacctgctgttgggcttctattcgcgctgcctgcgctctggcacctcggccagcctgggcgccgtgcaagtgccgctgttcgaccccgacatcacctccgactaccacagccctgtggaccacgaggacatctccgtctccgcacagacgctcagcatctcccgctcggtcagcaccaacatggactgagggacttctcagaggcagggcagcacacggccagccccgcggcctggcgctccgactgccctctgaggcctccggactcctctcgtacttgaactcactccctcacggggagagagaccacacgcagtattgagctgcctgagtgggcgtggtacctgctgtgggtgccagcgccccttccccacctcaggagcgtgagatgccaggtcgcacagagggcagcagcagcggccgtcccgcggcctctgggccccccagtgccctgcccactccatcaaggccctatgtggcccacctggcaggggcacagccccgggagtgggagcgggcgctggggccctgggccctgacccagcttccagctatgcaaggtgaggtctctggcccacccttcggacacagcagggaagccctcccgccaagtccccgccccacttgggggtgggccaaggtgcccccacaggtacccacaaagcacaggaccctgccacaaggcaggtggacaccatatatgcaaaccatgttaaatatgcaactttggggacccccatggggtctctctgtccctcccccattgggagctgggcccccagcagtagctggtctcaggctgcttggccaccaccctgtccctattctttggcttatcactccttcccctcccagcatggggcctgtttctcccctgccctctcctaagggcaatgcctgggcctttcttcccatttgcaagtgtcagctcccaggggctccctcctcctgctgggtggccactcccctccttggccctccagacaccactcatagtcagcacaggtttctgtatcctccccaaaactcccagacagtgcttcgtggacgatcgcacaaacatagccttttagtttctccagacaggaagaaagcctctcacacttaaacatgcaatgacgtgacacacttggagacatgagtgcagagccactcagccgctcctgggcctctgcagcagatgccagtggactggccttgcagggtgacgaccactaagaggaagacccccaactccatctgagcaggagaaggagctttgaagtaacccgagagctctccaggccccacccagacctttacccgctccccttcttcaagaagatctcctcctctctggtccaggagccctaacccactgcctctgcctgtccccaagggcccgcctccgtgtctccacagcacaactcgggcccaggcctgacaccactggagagaccccaggcccacttctagccaggcctgtgccttcctagtcactctaactcccagagagaataagaatgcatgtaatagctataccaaccgcgcatccggctttcacatgcactgtctcccctccctccacaccccacttcttcacttcaattggcagcgccacatccaggcgtcagcccccattcactccaggaacactttcttatccccacccctttgctcctcttctgcaaagccaatgcaggtggcaggaaggtgaggggtagtggaccaatggcaaccctctgtgggaacaaggggccgaggccacgctgcctgcatctcgtgctggggacctgcatgcgccagcaccagggcttggactggatcttactcagtccatggtgcccagcctctgccccaacatgccctctgcatgtgaccgtcatgccctggatggagccactcctggctcaccccacctgcactgcactgtccccagagagccacccctccacccactcagagacagctgtggagagggccaggagaatgggattaccctatgaccaaggagacatgggaagaagccctccttccttccacgatcgaggttccgccatcaactcggttctcggatatgcaagtacctcactttgttaacttattaacttattggtttcattaaagttttcaagaggaggtgattgttcttggttttgttcagtggctgtgaggtgaggctcctggtttgggggtggggacaaggagatttggattggtcgggactctttgttgtatacaacaaaaacccaaccctgtatggtttaaacagacaaacaaaaagaaacttattggcacagagaactgagaagtccaggggatagatttggtttcatgcacagtgagatctagatgcttaaacgtgtcaggactcttgtttcctgtaagccttcctttctggcaggctgacctctcatggtgaccagtaaaattggccaccactttcctaatagtttgcatcagtcaagatcaagtcaggaaggcagaaacaacactaagtttttcagcaaaagaatttattataggtaatgggttacactgatgcaggagggctgaaagaacaaaagagaattttctctaggtgattctgagatagcctagagaaaataactgcagaaagcagttaccactcccagagctgcaagagtataggaaacaggttggggttatcagaacccacaagcttgcggagagggagcccggtagtgttggggctcagagatctgaaaaggaggtactccctggctggtgctagtacctcttaggggacacaatgaggcttgtctgggagtatgggaaaaaagccgaagtctgggatcaactgttgcaacctggctgttgctgataaggataggaagcaaaggaagagagaagtctccacttttcttgccttccagtcttcccctagtaccccttattgtcaaagctagcgaacaaaggagtgatgtggtttgcagagtcccagccccagtatcacagagttagaaggctgcacttggaactgaaagacaataacatgggcacgggccacccctttggacacacagtttccacaaacatcaatccatacatacttgaaccgccatataacgacagtagcttccacctagtaagatgaaactgtcctttatacaaatgaagacactctagtcccctccccctaaatgggaaaaacacaacgtcccacggttcaacagatgcatccatctccaggggttagtcactgaatccatatttgggttaagtattcctctaattcaggcacaattccacctacaactaaacactaaagtaaagttgatcatcacatacaatgtttatataaaatatgggagaaaggaggagggaggaaaaaataatatgtacagtgcacacacacacatgcacacacatcccaagcaaggaaggaagtacgcatagccgcaatcgacctctttctggtatctctggtcacagtgccatggttggtatgaataatttccttattccattgcccttccatgtttcctttgccctcagccaacacctcagctttttagggacctttttttttttttttttttgagacagagtctcgcttggttgccaggctggaatgtagcggtgcgatctcagctcactgcaacttccacctcctgggttcaagcgattctcctgccttagcctcccaagtagctgggactacaggcatgtgccaccacacccagctaatttttgtatttttagtagagatggggtttcaccatgttggccaggatggtcttgatctcctgatctcgtgatccacctgccttgtcctcccaaagtgctgggattacaggcgtgagccaccgtgcctggccagggatctttatatggtggagtgacccagataatcattcctgaagggtctgaatcctcagcggtcctgcatgggtgggtgtcacagcttttcattgacttttgctatcatacatggaagtacttattatagaaaggccttagagaatcccttgggttccagacttagtcctccttgccctgttgtgtggcagcaaccaatttccgctcggtaatgaagatcagtcatgcagccagtgtattaactctttatttttcctgctggttgagtggcatgaggagcccacaatggcctggtt

SEQ ID NO: 6 - DNA, 4324 bp, Homo sapiens
gacatgtgagcggcgcgcgccggtggcaggtggaaaggcgagcggcatggagcgcgtaataagagagttggagtcggaaagagcagccccagtcgccggggaagcgggaggtcagtgcgggctccggcggcccccaggctccgagcgcccgcccgcggccccggcccggcccctagcccccgccgcccgcgcccgccccgggtcgcccctctggccccgggtccgagccatgcgtctctgagcgccccgagcgcgcccccgccccggaccgtgcccgggccccggcgcccccagcccggcgccgcccatggccgaggcccccccgcgccgcctcggcctgggtcccccgcccggggacgccccccgcgcggagctagtggcgctcacggccgtgcagagcgaacagggcgaggcgggcgggggcggctccccgcgccgcctcggcctcctgggcagccccctgccgccgggcgcgcccctccctgggccgggctccggctcgggctccgcctgcggccagcgctcctcggccgcgcacaagcgctaccgccgcctgcagaactgggtctacaacgtgctggagcggccccgcggctgggccttcgtctaccacgtcttcatatttttgctggtcttcagctgcctggtgctgtctgtgctgtccactatccaggagcaccaggaacttgccaacgagtgtctcctcatcttggaattcgtgatgatcgtggttttcggcttggagtacatcgtccgggtctggtccgccggatgctgctgccgctaccgaggatggcagggtcgcttccgctttgccagaaagcccttctgtgtcatcgacttcatcgtgttcgtggcctcggtggccgtcatcgccgcgggtacccagggcaacatcttcgccacgtccgcgctgcgcagcatgcgcttcctgcagatcctgcgcatggtgcgcatggaccgccgcggcggcacctggaagctgctgggctcagtggtctacgcgcatagcaaggagctgatcaccgcctggtacatcgggttcctggtgctcatcttcgcctccttcctggtctacctggctgagaaggacgccaactccgacttctcctcctacgccgactcgctctggtgggggacgattacattgacaaccatcggctatggtgacaagacaccgcacacatggctgggcagggtcctggctgctggcttcgccttactgggcatctctttctttgccctgcctgccggcatcctaggctccggctttgccctgaaggtccaggagcagcaccggcagaagcacttcgagaagcggaggatgccggcagccaacctcatccaggctgcctggcgcctgtactccaccgatatgagccgggcctacctgacagccacctggtactactatgacagtatcctcccatccttcagagagctggccctcttgtttgagcacgtgcaacgggcccgcaatgggggcctacggcccctggaggtgcggcgggcgccggtacccgacggagcaccctcccgttacccgcccgttgccacctgccaccggccgggcagcacctccttctgccctggggaaagcagccggatgggcatcaaagaccgcatccgcatgggcagctcccagcggcggacgggtccttccaagcagcatctggcacctccaacaatgcccacctccccaagcagcgagcaggtgggtgaggccaccagccccaccaaggtgcaaaagagctggagcttcaatgaccgcacccgcttccgggcatctctgagactcaaaccccgcacctctgctgaggatgccccctcagaggaagtagcagaggagaagagctaccagtgtgagctcacggtggacgacatcatgcctgctgtgaagacagtcatccgctccatcaggattctcaagttcctggtggccaaaaggaaattcaaggagacactgcgaccgtacgacgtgaaggacgtcattgagcagtactcagcaggccacctggacatgctgggccggatcaagagcctgcaaactcgggtggaccaaattgtgggtcgggggcccggggacaggaaggcccgggagaagggcgacaaggggccctccgacgcggaggtggtggatgaaatcagcatgatgggacgcgtggtcaaggtggagaagcaggtgcagtccatcgagcacaagctggacctgctgttgggcttctattcgcgctgcctgcgctctggcacctcggccagcctgggcgccgtgcaagtgccgctgttcgaccccgacatcacctccgactaccacagccctgtggaccacgaggacatctccgtctccgcacagacgctcagcatctcccgctcggtcagcaccaacatggactgagggacttctcagaggcagggcagcacacggccagccccgcggcctggcgctccgactgccctctgaggcctccggactcctctcgtacttgaactcactccctcacggggagagagaccacacgcagtattgagctgcctgagtgggcgtggtacctgctgtgggtgccagcgccccttccccacctcaggagcgtgagatgccaggtcgcacagagggcagcagcagcggccgtcccgcggcctctgggccccccagtgccctgcccactccatcaaggccctatgtggcccacctggcaggggcacagccccgggagtgggagcgggcgctggggccctgggccctgacccagcttccagctatgcaaggtgaggtctctggcccacccttcggacacagcagggaagccctcccgccaagtccccgccccacttgggggtgggccaaggtgcccccacaggtacccacaaagcacaggaccctgccacaaggcaggtggacaccatatatgcaaaccatgttaaatatgcaactttggggacccccatggggtctctctgtccctcccccattgggagctgggcccccagcagtagctggtctcaggctgcttggccaccaccctgtccctattctttggcttatcactccttcccctcccagcatggggcctgtttctcccctgccctctcctaagggcaatgcctgggcctttcttcccatttgcaagtgtcagctcccaggggctccctcctcctgctgggtggccactcccctccttggccctccagacaccactcatagtcagcacaggtttctgtatcctccccaaaactcccagacagtgcttcgtggacgatcgcacaaacatagccttttagtttctccagacaggaagaaagcctctcacacttaaacatgcaatgacgtgacacacttggagacatgagtgcagagccactcagccgctcctgggcctctgcagcagatgccagtggactggccttgcagggtgacgaccactaagaggaagacccccaactccatctgagcaggagaaggagctttgaagtaacccgagagctctccaggccccacccagacctttacccgctccccttcttcaagaagatctcctcctctctggtccaggagccctaacccactgcctctgcctgtccccaagggcccgcctccgtgtctccacagcacaactcgggcccaggcctgacaccactggagagaccccaggcccacttctagccaggcctgtgccttcctagtcactctaactcccagagagaataagaatgcatgtaatagctataccaaccgcgcatccggctttcacatgcactgtctcccctccctccacaccccacttcttcacttcaattggcagcgccacatccaggcgtcagcccccattcactccaggaacactttcttatccccacccctttgctcctcttctgcaaagccaatgcaggtggcaggaaggtgaggggtagtggaccaatggcaaccctctgtgggaacaaggggccgaggccacgctgcctgcatctcgtgctggggacctgcatgcgccagcaccagggcttggactggatcttactcagtccatggtgcccagcctctgccccaacatgccctctgcatgtgaccgtcatgccctggatggagccactcctggctcaccccacctgcactgcactgtccccagagagccacccctccacccactcagagacagctgtggagagggccaggagaatgggattaccctatgaccaaggagacatgggaagaagccctccttccttccacgatcgaggttccgccatcaactcggttctcggatatgcaagtacctcactttgttaacttattaacttattggtttcattaaagttttcaagagga

SEQ ID NO: 7 - DNA, 4162 bp, Homo sapiens
gacatgtgagcggcgcgcgccggtggcaggtggaaaggcgagcggcatggagcgcgtaataagagagttggagtcggaaagagcagccccagtcgccggggaagcgggaggtcagtgcgggctccggcggcccccaggctccgagcgcccgcccgcggccccggcccggcccctagcccccgccgcccgcgcccgccccgggtcgcccctctggccccgggtccgagccatgcgtctctgagcgccccgagcgcgcccccgccccggaccgtgcccgggccccggcgcccccagcccggcgccgcccatggccgaggcccccccgcgccgcctcggcctgggtcccccgcccggggacgccccccgcgcggagctagtggcgctcacggccgtgcagagcgaacagggcgaggcgggcgggggcggctccccgcgccgcctcggcctcctgggcagccccctgccgccgggcgcgcccctccctgggccgggctccggctcgggctccgcctgcggccagcgctcctcggccgcgcacaagcgctaccgccgcctgcagaactgggtctacaacgtgctggagcggccccgcggctgggccttcgtctaccacgtcttcatatttttgctggtcttcagctgcctggtgctgtctgtgctgtccactatccaggagcaccaggaacttgccaacgagtgtctcctcatcttggaattcgtgatgatcgtggttttcggcttggagtacatcgtccgggtctggtccgccggatgctgctgccgctaccgaggatggcagggtcgcttccgctttgccagaaagcccttctgtgtcatcgacttcatcgtgttcgtggcctcggtggccgtcatcgccgcgggtacccagggcaacatcttcgccacgtccgcgctgcgcagcatgcgcttcctgcagatcctgcgcatggtgcgcatggaccgccgcggcggcacctggaagctgctgggctcagtggtctacgcgcatagcaaggagctgatcaccgcctggtacatcgggttcctggtgctcatcttcgcctccttcctggtctacctggctgagaaggacgccaactccgacttctcctcctacgccgactcgctctggtgggggacgattacattgacaaccatcggctatggtgacaagacaccgcacacatggctgggcagggtcctggctgctggcttcgccttactgggcatctctttctttgccctgcctgccggcatcctaggctccggctttgccctgaaggtccaggagcagcaccggcagaagcacttcgagaagcggaggatgccggcagccaacctcatccaggctgcctggcgcctgtactccaccgatatgagccgggcctacctgacagccacctggtactactatgacagtatcctcccatccttcagcagccggatgggcatcaaagaccgcatccgcatgggcagctcccagcggcggacgggtccttccaagcagcatctggcacctccaacaatgcccacctccccaagcagcgagcaggtgggtgaggccaccagccccaccaaggtgcaaaagagctggagcttcaatgaccgcacccgcttccgggcatctctgagactcaaaccccgcacctctgctgaggatgccccctcagaggaagtagcagaggagaagagctaccagtgtgagctcacggtggacgacatcatgcctgctgtgaagacagtcatccgctccatcaggattctcaagttcctggtggccaaaaggaaattcaaggagacactgcgaccgtacgacgtgaaggacgtcattgagcagtactcagcaggccacctggacatgctgggccggatcaagagcctgcaaactcgggtggaccaaattgtgggtcgggggcccggggacaggaaggcccgggagaagggcgacaaggggccctccgacgcggaggtggtggatgaaatcagcatgatgggacgcgtggtcaaggtggagaagcaggtgcagtccatcgagcacaagctggacctgctgttgggcttctattcgcgctgcctgcgctctggcacctcggccagcctgggcgccgtgcaagtgccgctgttcgaccccgacatcacctccgactaccacagccctgtggaccacgaggacatctccgtctccgcacagacgctcagcatctcccgctcggtcagcaccaacatggactgagggacttctcagaggcagggcagcacacggccagccccgcggcctggcgctccgactgccctctgaggcctccggactcctctcgtacttgaactcactccctcacggggagagagaccacacgcagtattgagctgcctgagtgggcgtggtacctgctgtgggtgccagcgccccttccccacctcaggagcgtgagatgccaggtcgcacagagggcagcagcagcggccgtcccgcggcctctgggccccccagtgccctgcccactccatcaaggccctatgtggcccacctggcaggggcacagccccgggagtgggagcgggcgctggggccctgggccctgacccagcttccagctatgcaaggtgaggtctctggcccacccttcggacacagcagggaagccctcccgccaagtccccgccccacttgggggtgggccaaggtgcccccacaggtacccacaaagcacaggaccctgccacaaggcaggtggacaccatatatgcaaaccatgttaaatatgcaactttggggacccccatggggtctctctgtccctcccccattgggagctgggcccccagcagtagctggtctcaggctgcttggccaccaccctgtccctattctttggcttatcactccttcccctcccagcatggggcctgtttctcccctgccctctcctaagggcaatgcctgggcctttcttcccatttgcaagtgtcagctcccaggggctccctcctcctgctgggtggccactcccctccttggccctccagacaccactcatagtcagcacaggtttctgtatcctccccaaaactcccagacagtgcttcgtggacgatcgcacaaacatagccttttagtttctccagacaggaagaaagcctctcacacttaaacatgcaatgacgtgacacacttggagacatgagtgcagagccactcagccgctcctgggcctctgcagcagatgccagtggactggccttgcagggtgacgaccactaagaggaagacccccaactccatctgagcaggagaaggagctttgaagtaacccgagagctctccaggccccacccagacctttacccgctccccttcttcaagaagatctcctcctctctggtccaggagccctaacccactgcctctgcctgtccccaagggcccgcctccgtgtctccacagcacaactcgggcccaggcctgacaccactggagagaccccaggcccacttctagccaggcctgtgccttcctagtcactctaactcccagagagaataagaatgcatgtaatagctataccaaccgcgcatccggctttcacatgcactgtctcccctccctccacaccccacttcttcacttcaattggcagcgccacatccaggcgtcagcccccattcactccaggaacactttcttatccccacccctttgctcctcttctgcaaagccaatgcaggtggcaggaaggtgaggggtagtggaccaatggcaaccctctgtgggaacaaggggccgaggccacgctgcctgcatctcgtgctggggacctgcatgcgccagcaccagggcttggactggatcttactcagtccatggtgcccagcctctgccccaacatgccctctgcatgtgaccgtcatgccctggatggagccactcctggctcaccccacctgcactgcactgtccccagagagccacccctccacccactcagagacagctgtggagagggccaggagaatgggattaccctatgaccaaggagacatgggaagaagccctccttccttccacgatcgaggttccgccatcaactcggttctcggatatgcaagtacctcactttgttaacttattaacttattggtttcattaaagttttcaagagga

SEQ ID NO: 8 - DNA, 3345 bp, Homo sapiens
gaccactcgtaccacaaagtgggcagctgaggagctgatcaccgcctggtacatcgggttcctggtgctcatcttcgcctccttcctggtctacctggctgagaaggacgccaactccgacttctcctcctacgccgactcgctctggtgggggacgattacattgacaaccatcggctatggtgacaagacaccgcacacatggctgggcagggtcctggctgctggcttcgccttactgggcatctctttctttgccctgcctgccggcatcctaggctccggctttgccctgaaggtccaggagcagcaccggcagaagcacttcgagaagcggaggatgccggcagccaacctcatccaggctgcctggcgcctgtactccaccgatatgagccgggcctacctgacagccacctggtactactatgacagtatcctcccatccttcagagagctggccctcttgtttgagcacgtgcaacgggcccgcaatgggggcctacggcccctggaggtgcggcgggcgccggtacccgacggagcaccctcccgttacccgcccgttgccacctgccaccggccgggcagcacctccttctgccctggggaaagcagccggatgggcatcaaagaccgcatccgcatgggcagctcccagcggcggacgggtccttccaagcagcatctggcacctccaacaatgcccacctccccaagcagcgagcaggtgggtgaggccaccagccccaccaaggtgcaaaagagctggagcttcaatgaccgcacccgcttccgggcatctctgagactcaaaccccgcacctctgctgaggatgccccctcagaggaagtagcagaggagaagagctaccagtgtgagctcacggtggacgacatcatgcctgctgtgaagacagtcatccgctccatcaggattctcaagttcctggtggccaaaaggaaattcaaggagacactgcgaccgtacgacgtgaaggacgtcattgagcagtactcagcaggccacctggacatgctgggccggatcaagagcctgcaaactcgggtggaccaaattgtgggtcgggggcccggggacaggaaggcccgggagaagggcgacaaggggccctccgacgcggaggtggtggatgaaatcagcatgatgggacgcgtggtcaaggtggagaagcaggtgcagtccatcgagcacaagctggacctgctgttgggcttctattcgcgctgcctgcgctctggcacctcggccagcctgggcgccgtgcaagtgccgctgttcgaccccgacatcacctccgactaccacagccctgtggaccacgaggacatctccgtctccgcacagacgctcagcatctcccgctcggtcagcaccaacatggactgagggacttctcagaggcagggcagcacacggccagccccgcggcctggcgctccgactgccctctgaggcctccggactcctctcgtacttgaactcactccctcacggggagagagaccacacgcagtattgagctgcctgagtgggcgtggtacctgctgtgggtgccagcgccccttccccacctcaggagcgtgagatgccaggtcgcacagagggcagcagcagcggccgtcccgcggcctctgggccccccagtgccctgcccactccatcaaggccctatgtggcccacctggcaggggcacagccccgggagtgggagcgggcgctggggccctgggccctgacccagcttccagctatgcaaggtgaggtctctggcccacccttcggacacagcagggaagccctcccgccaagtccccgccccacttgggggtgggccaaggtgcccccacaggtacccacaaagcacaggaccctgccacaaggcaggtggacaccatatatgcaaaccatgttaaatatgcaactttggggacccccatggggtctctctgtccctcccccattgggagctgggcccccagcagtagctggtctcaggctgcttggccaccaccctgtccctattctttggcttatcactccttcccctcccagcatggggcctgtttctcccctgccctctcctaagggcaatgcctgggcctttcttcccatttgcaagtgtcagctcccaggggctccctcctcctgctgggtggccactcccctccttggccctccagacaccactcatagtcagcacaggtttctgtatcctccccaaaactcccagacagtgcttcgtggacgatcgcacaaacatagccttttagtttctccagacaggaagaaagcctctcacacttaaacatgcaatgacgtgacacacttggagacatgagtgcagagccactcagccgctcctgggcctctgcagcagatgccagtggactggccttgcagggtgacgaccactaagaggaagacccccaactccatctgagcaggagaaggagctttgaagtaacccgagagctctccaggccccacccagacctttacccgctccccttcttcaagaagatctcctcctctctggtccaggagccctaacccactgcctctgcctgtccccaagggcccgcctccgtgtctccacagcacaactcgggcccaggcctgacaccactggagagaccccaggcccacttctagccaggcctgtgccttcctagtcactctaactcccagagagaataagaatgcatgtaatagctataccaaccgcgcatccggctttcacatgcactgtctcccctccctccacaccccacttcttcacttcaattggcagcgccacatccaggcgtcagcccccattcactccaggaacactttcttatccccacccctttgctcctcttctgcaaagccaatgcaggtggcaggaaggtgaggggtagtggaccaatggcaaccctctgtgggaacaaggggccgaggccacgctgcctgcatctcgtgctggggacctgcatgcgccagcaccagggcttggactggatcttactcagtccatggtgcccagcctctgccccaacatgccctctgcatgtgaccgtcatgccctggatggagccactcctggctcaccccacctgcactgcactgtccccagagagccacccctccacccactcagagacagctgtggagagggccaggagaatgggattaccctatgaccaaggagacatgggaagaagccctccttccttccacgatcgaggttccgccatcaactcggttctcggatatgcaagtacctcactttgttaacttattaacttattggtttcattaaagttttcaagaggaggtga

SEQ ID NO: 9 - DNA, 2085 bp, Artificial Sequence
  source: /note="Description of Artificial Sequence: Synthetic polynucleotide"
atggctgaagcccctcctagaaggcttggactgggacctcctcctggggatgctcctagagctgaactggtggctctgacagccgtgcagtctgaacaaggcgaagctggtggcggcggatctccacgtagacttggactgctgggaagccctcttcctcctggtgctccacttcctggacctggcagtggatctggatctgcctgtggccagagaagctctgccgctcacaagagataccggcggctgcagaactgggtgtacaacgtgctggaaagacccagaggctgggccttcgtgtaccacgtgttcatctttctgctggtgttcagctgcctggtgctgtccgtgctgagcaccatccaagaacatcaagagctggctaacgagtgcctgttaatactggagtttgtgatgattgtggtgttcggcctcgagtacatcgtccgcgtttggagcgccggctgctgctgcagatatagaggttggcaaggcagattccgcttcgccagaaagcccttctgcgtgatcgacttcatcgtgttcgtggccagcgtggccgtgattgctgctggcacacagggcaacatcttcgccacaagcgccctgcggagcatgcggtttctgcagatcctgagaatggtccgaatggacagaagaggcggcacctggaagctgctgggctctgtggtgtacgcccacagcaaagagctgatcaccgcctggtacatcggatttctggtgctgatcttcgcctccttcctggtgtacctggccgagaaggacgccaacagcgactttagcagctacgccgactctctttggtggggcaccatcacactgaccaccatcggctacggcgacaagacccctcacacatggctgggaagagtgctggccgctggatttgctctgctgggcatcagctttttcgccctgcctgccggaatcctcggatctggctttgccctgaaggtgcaagagcagcaccggcagaagcacttcgagaagagaagaatgcctgccgccaacctgattcaggccgcttggagactgtacagcaccgacatgagcagagcctacctgaccgccacgtggtattattacgactcgatcctgcctagcttccgcgaactggccctgctgtttgagcatgtgcagagagccagaaacggcggcctcagacctctggaagttcggagagcacctgtgcctgatggcgccccttctagatatcctccagtggccacctgtcacagacccggcagcacatctttttgccctggcgagtctagccggatgggcatcaaggacagaatcagaatgggcagcagccagcggagaacaggcccttctaaacagcatctggcccctccaaccatgcctacaagccctagctctgagcaagtgggcgaagccacctctcctaccaaggtgcagaagtcctggtccttcaacgaccggaccagattcagagccagcctgagactgaagcccagaacctctgccgaggatgccccttctgaagaggtggccgaagagaagtcctaccagtgcgagctgaccgtggacgacatcatgccagccgtgaaaaccgtgatacggtctatccggatcctgaagttcctggtggccaagcggaagttcaaagagacactgcggccctacgacgtgaaggacgtgatcgagcagtattctgccggccacctggacatgctgggcagaatcaagagcctgcagaccagagtggaccagatcgttggaagaggcccaggcgacagaaaggccagagagaagggcgataagggcccatctgatgccgaggttgtcgacgagatatcaatgatgggcagagtggtcaaggtggaaaaacaggtgcagagcatcgagcacaagctggacctgctgctgggattctacagccggtgtctgagaagcggcacatctgcatctctgggcgctgtgcaggtcccactgttcgaccctgatatcaccagcgactatcacagccccgtggaccacgaggacatctccgtttctgctcagaccctgagcatcagcagatccgtgtccaccaacatggac

SEQ ID NO: 10 - DNA, 2085 bp, Artificial Sequence
  source: /note="Description of Artificial Sequence: Synthetic polynucleotide"
atggctgaagcccctcctagaaggcttggactgggacctcctcctggggatgctcctagagctgaactggtggctctgacagccgtgcagtctgaacaaggcgaagctggtggcggcggatctccacgtagacttggactgctgggaagccctcttcctcctggtgctccacttcctggacctggcagtggatctggatctgcctgtggccagagaagctctgccgctcacaagagataccggcggctgcagaactgggtgtacaacgtgctggaaagacccagaggctgggccttcgtgtaccacgtgttcatctttctgctggtgttcagctgcctggtgctgtccgtgctgagcaccatccaagaacatcaagagctggctaacgagtgcctgttaatactggagtttgtgatgattgtggtgttcggcctcgagtacatcgtccgcgtttggagcgccggctgctgctgcagatatagaggttggcaaggcagattccgcttcgccagaaagcccttctgcgtgatcgacttcatcgtgttcgtggccagcgtggccgtgattgctgctggcacacagggcaacatcttcgccacaagcgccctgcggagcatgcggtttctgcagatcctgagaatggtccgaatggacagaagaggcggcacctggaagctgctgggctctgtggtgtacgcccacagcaaagagctgatcaccgcctggtacatcggatttctggtgctgatcttcgcctccttcctggtgtacctggccgagaaggacgccaacagcgactttagcagctacgccgactctctttggtggggcaccatcacactgaccaccatcggctacggcgacaagacccctcacacatggctgggaagagtgctggccgctggatttgctctgctgggcatcagctttttcgccctgcctgccggaatcctcggatctggctttgccctgaaggtgcaagagcagcatagacaaaagcattttgaaaagagaagaatgcctgccgccaacctgattcaggccgcttggagactgtacagcaccgacatgagcagagcctacctgaccgccacgtggtattattacgattcgatcctgcctagcttccgcgaactggccctgctgtttgagcatgtgcagagagccagaaacggcggcctcagacctctggaagttcggagagcacctgtgcctgatggcgccccttctagatatcctccagtggccacctgtcacagacccggcagcacatctttttgccctggcgagtctagccggatgggcatcaaggacagaatcagaatgggcagcagccagcggagaacaggcccttctaaacagcatctggcccctccaaccatgcctacaagccctagctctgagcaagtgggcgaagccacctctcctaccaaggtgcagaagtcctggtccttcaacgaccggaccagatttagagccagcctccggctgaagcccagaacctctgccgaggatgccccttctgaagaggtggccgaagagaagtcctaccagtgcgagctgaccgtggacgacatcatgccagccgtgaaaaccgtgataaggtctatacgcatcctgaagttcctggtggccaagcggaagttcaaagagacactgcggccctacgacgtgaaggacgtgatcgagcagtattctgccggccacctggacatgctgggcagaatcaagagcctgcagaccagagtggaccagatcgttggaagaggcccaggcgacagaaaggccagagagaagggcgataagggcccatctgatgccgaggttgtcgacgagatatcaatgatgggcagagtcgtgaaagtcgaaaaacaggtgcagagcatcgagcacaagctggacctgctgctgggattctacagccggtgtctgagaagcggcacatctgcatctctgggcgctgtgcaggtcccactgttcgatcctgatattacgagcgattatcacagccccgtggaccacgaggacatctccgtttctgctcagaccctgagcatcagcagatccgtgtccaccaacatggac

SEQ ID NO: 11 - protein, 695 aa, Homo sapiens [sequence omitted]

SEQ ID NO: 12 - protein, 641 aa, Homo sapiens
MAEAPPRRLGLGPPPGDAPRAELVALTAVQSEQGEAGGGGSPRRLGLLGSPLPPGAPLPGPGSGSGSACGQRSSAAHKRYRRLQNWVYNVLERPRGWAFVYHVFIFLLVFSCLVLSVLSTIQEHQELANECLLILEFVMIVVFGLEYIVRVWSAGCCCRYRGWQGRFRFARKPFCVIDFIVFVASVAVIAAGTQGNIFATSALRSMRFLQILRMVRMDRRGGTWKLLGSVVYAHSKELITAWYIGFLVLIFASFLVYLAEKDANSDFSSYADSLWWGTITLTTIGYGDKTPHTWLGRVLAAGFALLGISFFALPAGILGSGFALKVQEQHRQKHFEKRRMPAANLIQAAWRLYSTDMSRAYLTATWYYYDSILPSFSSRMGIKDRIRMGSSQRRTGPSKQHLAPPTMPTSPSSEQVGEATSPTKVQKSWSFNDRTRFRASLRLKPRTSAEDAPSEEVAEEKSYQCELTVDDIMPAVKTVIRSIRILKFLVAKRKFKETLRPYDVKDVIEQYSAGHLDMLGRIKSLQTRVDQIVGRGPGDRKAREKGDKGPSDAEVVDEISMMGRVVKVEKQVQSIEHKLDLLLGFYSRCLRSGTSASLGAVQVPLFDPDITSDYHSPVDHEDISVSAQTLSISRSVSTNMD

SEQ ID NO: 13 - protein, 356 aa, Homo sapiens
MPAANLIQAAWRLYSTDMSRAYLTATWYYYDSILPSFRELALLFEHVQRARNGGLRPLEVRRAPVPDGAPSRYPPVATCHRPGSTSFCPGESSRMGIKDRIRMGSSQRRTGPSKQHLAPPTMPTSPSSEQVGEATSPTKVQKSWSFNDRTRFRASLRLKPRTSAEDAPSEEVAEEKSYQCELTVDDIMPAVKTVIRSIRILKFLVAKRKFKETLRPYDVKDVIEQYSAGHLDMLGRIKSLQTRVDQIVGRGPGDRKAREKGDKGPSDAEVVDEISMMGRVVKVEKQVQSIEHKLDLLLGFYSRCLRSGTSASLGAVQVPLFDPDITSDYHSPVDHEDISVSAQTLSISRSVSTNMD

SEQ ID NO: 14 - protein, 736 aa, Artificial Sequence
  source: /note="Description of Artificial Sequence: Synthetic polypeptide"
MAADGYLPDWLEDNLSEGIREWWDLKPGAPKPKANQQKQDDGRGLVLPGYKYLGPFNGLDKGEPVNAADAAALEHDKAYDQQLKAGDNPYLRYNHADAEFQERLQEDTSFGGNLGRAVFQAKKRVLEPLGLVEEGAKTAPGKKRPVEQSPQEPDSSSGIGKKGQQPARKRLNFGQTGDSESVPDPQPLGEPPAAPSGVGSNTMAAGGGAPMADNNEGADGVGNASGNWHCDSTWLGDRVITTSTRTWALPTYNNHLYKQISSQSGGSTNDNTYFGYSTPWGYFDFNRFHCHFSPRDWQRLINNNWGFRPKKLNFKLFNIQVKEVTTNDGTTTIANNLTSTVQVFTDSEYQLPYVLGSAHQGCLPPFPADVFMIPQYGYLTLNNGSQAVGRSSFYCLEYFPSQMLRTGNNFQFSYTFEDVPFHSSYAHSQSLDRLMNPLIDQYLYYLSRTQTTSGTAGNRTLQFSQAGPSSMANQAKNWLPGPCYRQQRVSKTTNQNNNSNFAWTGATKYHLNGRDSLVNPGPAMATHKDDEDKFFPMSGVLIFGKQGAGNSNVDLDNVMITNEEEIKTTNPVATEEYGTVATNLQSANTAPATGTVNSQGALPGMVWQDRDVYLQGPIWAKIPHTDGHFHPSPLMGGFGLKHPPPQILIKNTPVPANPPTTFSPAKFASFITQYSTGQVSVEIEWELQKENSKRWNPEIQYTSNYNKSTNVDFAVDTNGVYSEPRPIGTRYLTRNL

SEQ ID NO: 15 - DNA, 145 bp, Artificial Sequence
  source: /note="Description of Artificial Sequence: Synthetic polynucleotide"
ttggccactccctctctgcgcgctcgctcgctcactgaggccgcccgggcaaagcccgggcgtcgggcgacctttggtcgcccggcctcagtgagcgagcgagcgcgcagagagggagtggccaactccatcactaggggttcct

SEQ ID NO: 16 - DNA, 145 bp, Artificial Sequence
  source: /note="Description of Artificial Sequence: Synthetic polynucleotide"
aggaacccctagtgatggagttggccactccctctctgcgcgctcgctcgctcactgaggccgggcgaccaaaggtcgcccgacgcccgggctttgcccgggcggcctcagtgagcgagcgagcgcgcagagagggagtggccaa

SEQ ID NO: 17 - DNA, 127 bp, Artificial Sequence
  source: /note="Description of Artificial Sequence: Synthetic polynucleotide"
cctgcaggcagctgcgcgctcgctcgctcactgaggccgcccgggcgtcgggcgacctttggtcgcccggcctcagtgagcgagcgagcgcgcagagagggagtggccaactccatcactaggggtt

SEQ ID NO: 18 - DNA, 141 bp, Artificial Sequence
  source: /note="Description of Artificial Sequence: Synthetic polynucleotide"
aggaacccctagtgatggagttggccactccctctctgcgcgctcgctcgctcactgaggccgggcgaccaaaggtcgcccgacgcccgggctttgcccgggcggcctcagtgagcgagcgagcgcgcagctgcctgcagg

SEQ ID NO: 19 - DNA, 119 bp, Artificial Sequence
  source: /note="Description of Artificial Sequence: Synthetic polynucleotide"
ctgcgcgctcgctcgctcactgaggccgcccgggcgtcgggcgacctttggtcgcccggcctcagtgagcgagcgagcgcgcagagagggagtggccaactccatcactaggggttcct

SEQ ID NO: 20 - DNA, 130 bp, Artificial Sequence
  source: /note="Description of Artificial Sequence: Synthetic polynucleotide"
aggaacccctagtgatggagttggccactccctctctgcgcgctcgctcgctcactgaggccgggcgaccaaaggtcgcccgacgcccgggctttgcccgggcggcctcagtgagcgagcgagcgcgcag

SEQ ID NO: 21 - DNA, 145 bp, Artificial Sequence; identical to SEQ ID NO: 15
  source: /note="Description of Artificial Sequence: Synthetic polynucleotide"

SEQ ID NO: 22 - DNA, 381 bp, Artificial Sequence
  source: /note="Description of Artificial Sequence: Synthetic polynucleotide"
gacattgattattgactagttattaatagtaatcaattacggggtcattagttcatagcccatatatggagttccgcgttacataacttacggtaaatggcccgcctggctgaccgcccaacgacccccgcccattgacgtcaataatgacgtatgttcccatagtaacgccaatagggactttccattgacgtcaatgggtggactatttacggtaaactgcccacttggcagtacatcaagtgtatcatatgccaagtacgccccctattgacgtcaatgacggtaaatggcccgcctggcattatgcccagtacatgaccttatgggactttcctacttggcagtacatctacgtattagtcatcgctattaccatgg

SEQ ID NO: 23 - DNA, 279 bp, Artificial Sequence
  source: /note="Description of Artificial Sequence: Synthetic polynucleotide"
gtcgaggtgagccccacgttctgcttcactctccccatctcccccccctccccacccccaattttgtatttatttattttttaattattttgtgcagcgatgggggcggggggggggggggggcgcgcgccaggcggggcggggcggggcgaggggcggggcggggcgaggcggagaggtgcggcggcagccaatcagagcggcgcgctccgaaagtttccttttatggcgaggcggcggcggcggcggccctataaaaagcgaagcgcgcggcgggcg

SEQ ID NO: 24 - DNA, 1013 bp, Artificial Sequence
  source: /note="Description of Artificial Sequence: Synthetic polynucleotide"
ggagtcgctgcgttgccttcgccccgtgccccgctccgcgccgcctcgcgccgcccgccccggctctgactgaccgcgttactcccacaggtgagcgggcgggacggcccttctcctccgggctgtaattagcgcttggtttaatgacggctcgtttcttttctgtggctgcgtgaaagccttaaagggctccgggagggccctttgtgcgggggggagcggctcggggggtgcgtgcgtgtgtgtgtgcgtggggagcgccgcgtgcggcccgcgctgcccggcggctgtgagcgctgcgggcgcggcgcggggctttgtgcgctccgcgtgtgcgcgaggggagcgcggccgggggcggtgccccgcggtgcgggggggctgcgaggggaacaaaggctgcgtgcggggtgtgtgcgtgggggggtgagcagggggtgtgggcgcggcggtcgggctgtaacccccccctgcacccccctccccgagttgctgagcacggcccggcttcgggtgcggggctccgtgcggggcgtggcgcggggctcgccgtgccgggcggggggtggcggcaggtgggggtgccgggcggggcggggccgcctcgggccggggagggctcgggggaggggcgcggcggcccccggagcgccggcggctgtcgaggcgcggcgagccgcagccattgccttttatggtaatcgtgcgagagggcgcagggacttcctttgtcccaaatctgtgcggagccgaaatctgggaggcgccgccgcaccccctctagcgggcgcggggcgaagcggtgcggcgccggcaggaaggaaatgggcggggagggccttcgtgcgtcgccgcgccgccgtccccttctccctctccagcctcggggctgtccgcggggggacggctgccttcgggggggacggggcagggcggggttcggcttctggcgtgtgaccggcggctctagagcctctgctaaccatgttcatgccttcttctttttcctacag

SEQ ID NO: 25 - DNA, 307 bp, Homo sapiens
gacatgtgagcggcgcgcgccggtggcaggtggaaaggcgagcggcatggagcgcgtaataagagagttggagtcggaaagagcagccccagtcgccggggaagcgggaggtcagtgcgggctccggcggcccccaggctccgagcgcccgcccgcggccccggcccggcccctagcccccgccgcccgcgcccgccccgggtcgcccctctggccccgggtccgagccatgcgtctctgagcgccccgagcgcgcccccgccccggaccgtgcccgggccccggcgcccccagcccggcgccgccc

SEQ ID NO: 26 - DNA, 307 bp, Homo sapiens; identical to SEQ ID NO: 25

SEQ ID NO: 27 - DNA, 340 bp, Homo sapiens
gaccactcgtaccacaaagtgggcagctgaggagctgatcaccgcctggtacatcgggttcctggtgctcatcttcgcctccttcctggtctacctggctgagaaggacgccaactccgacttctcctcctacgccgactcgctctggtgggggacgattacattgacaaccatcggctatggtgacaagacaccgcacacatggctgggcagggtcctggctgctggcttcgccttactgggcatctctttctttgccctgcctgccggcatcctaggctccggctttgccctgaaggtccaggagcagcaccggcagaagcacttcgagaagcggagg

SEQ ID NO: 28 - DNA, 1929 bp, Homo sapiens
gggacttctcagaggcagggcagcacacggccagccccgcggcctggcgctccgactgccctctgaggcctccggactcctctcgtacttgaactcactccctcacggggagagagaccacacgcagtattgagctgcctgagtgggcgtggtacctgctgtgggtgccagcgccccttccccacctcaggagcgtgagatgccaggtcgcacagagggcagcagcagcggccgtcccgcggcctctgggccccccagtgccctgcccactccatcaaggccctatgtggcccacctggcaggggcacagccccgggagtgggagcgggcgctggggccctgggccctgacccagcttccagctatgcaaggtgaggtctctggcccacccttcggacacagcagggaagccctcccgccaagtccccgccccacttgggggtgggccaaggtgcccccacaggtacccacaaagcacaggaccctgccacaaggcaggtggacaccatatatgcaaaccatgttaaatatgcaactttggggacccccatggggtctctctgtccctcccccattgggagctgggcccccagcagtagctggtctcaggctgcttggccaccaccctgtccctattctttggcttatcactccttcccctcccagcatggggcctgtttctcccctgccctctcctaagggcaatgcctgggcctttcttcccatttgcaagtgtcagctcccaggggctccctcctcctgctgggtggccactcccctccttggccctccagacaccactcatagtcagcacaggtttctgtatcctccccaaaactcccagacagtgcttcgtggacgatcgcacaaacatagccttttagtttctccagacaggaagaaagcctctcacacttaaacatgcaatgacgtgacacacttggagacatgagtgcagagccactcagccgctcctgggcctctgcagcagatgccagtggactggccttgcagggtgacgaccactaagaggaagacccccaactccatctgagcaggagaaggagctttgaagtaacccgagagctctccaggccccacccagacctttacccgctccccttcttcaagaagatctcctcctctctggtccaggagccctaacccactgcctctgcctgtccccaagggcccgcctccgtgtctccacagcacaactcgggcccaggcctgacaccactggagagaccccaggcccacttctagccaggcctgtgccttcctagtcactctaactcccagagagaataagaatgcatgtaatagctataccaaccgcgcatccggctttcacatgcactgtctcccctccctccacaccccacttcttcacttcaattggcagcgccacatccaggcgtcagcccccattcactccaggaacactttcttatccccacccctttgctcctcttctgcaaagccaatgcaggtggcaggaaggtgaggggtagtggaccaatggcaaccctctgtgggaacaaggggccgaggccacgctgcctgcatctcgtgctggggacctgcatgcgccagcaccagggcttggactggatcttactcagtccatggtgcccagcctctgccccaacatgccctctgcatgtgaccgtcatgccctggatggagccactcctggctcaccccacctgcactgcactgtccccagagagccacccctccacccactcagagacagctgtggagagggccaggagaatgggattaccctatgaccaaggagacatgggaagaagccctccttccttccacgatcgaggttccgccatcaactcggttctcggatatgcaagtacctcactttgttaacttattaacttattggtttcattaaagttttcaagagga

SEQ ID NO: 29 - DNA, 1929 bp, Homo sapiens; identical to SEQ ID NO: 28

SEQ ID NO: 30 - DNA, 1934 bp, Homo sapiens
gggacttctcagaggcagggcagcacacggccagccccgcggcctggcgctccgactgccctctgaggcctccggactcctctcgtacttgaactcactccctcacggggagagagaccacacgcagtattgagctgcctgagtgggcgtggtacctgctgtgggtgccagcgccccttccccacctcaggagcgtgagatgccaggtcgcacagagggcagcagcagcggccgtcccgcggcctctgggccccccagtgccctgcccactccatcaaggccctatgtggcccacctggcaggggcacagccccgggagtgggagcgggcgctggggccctgggccctgacccagcttccagctatgcaaggtgaggtctctggcccacccttcggacacagcagggaagccctcccgccaagtccccgccccacttgggggtgggccaaggtgcccccacaggtacccacaaagcacaggaccctgccacaaggcaggtggacaccatatatgcaaaccatgttaaatatgcaactttggggacccccatggggtctctctgtccctcccccattgggagctgggcccccagcagtagctggtctcaggctgcttggccaccaccctgtccctattctttggcttatcactccttcccctcccagcatggggcctgtttctcccctgccctctcctaagggcaatgcctgggcctttcttcccatttgcaagtgtcagctcccaggggctccctcctcctgctgggtggccactcccctccttggccctccagacaccactcatagtcagcacaggtttctgtatcctccccaaaactcccagacagtgcttcgtggacgatcgcacaaacatagccttttagtttctccagacaggaagaaagcctctcacacttaaacatgcaatgacgtgacacacttggagacatgagtgcagagccactcagccgctcctgggcctctgcagcagatgccagtggactggccttgcagggtgacgaccactaagaggaagacccccaactccatctgagcaggagaaggagctttgaagtaacccgagagctctccaggccccacccagacctttacccgctccccttcttcaagaagatctcctcctctctggtccaggagccctaacccactgcctctgcctgtccccaagggcccgcctccgtgtctccacagcacaactcgggcccaggcctgacaccactggagagaccccaggcccacttctagccaggcctgtgccttcctagtcactctaactcccagagagaataagaatgcatgtaatagctataccaaccgcgcatccggctttcacatgcactgtctcccctccctccacaccccacttcttcacttcaattggcagcgccacatccaggcgtcagcccccattcactccaggaacactttcttatccccacccctttgctcctcttctgcaaagccaatgcaggtggcaggaaggtgaggggtagtggaccaatggcaaccctctgtgggaacaaggggccgaggccacgctgcctgcatctcgtgctggggacctgcatgcgccagcaccagggcttggactggatcttactcagtccatggtgcccagcctctgccccaacatgccctctgcatgtgaccgtcatgccctggatggagccactcctggctcaccccacctgcactgcactgtccccagagagccacccctccacccactcagagacagctgtggagagggccaggagaatgggattaccctatgaccaaggagacatgggaagaagccctccttccttccacgatcgaggttccgccatcaactcggttctcggatatgcaagtacctcactttgttaacttattaacttattggtttcattaaagttttcaagaggaggtga

SEQ ID NO: 31 - DNA, 82 bp, Artificial Sequence
  source: /note="Description of Artificial Sequence: Synthetic oligonucleotide"
gtaagtatcaaggttacaagacaggtttaaggagaccaatagaaactgggcttgtcgagacagagaagactcttgcgtttct

SEQ ID NO: 32 - DNA, 51 bp, Artificial Sequence
  source: /note="Description of Artificial Sequence: Synthetic oligonucleotide"
gataggcacctattggtcttactgacatccactttgcctttctctccacag

SEQ ID NO: 33 - DNA, 240 bp, Artificial Sequence
  source: /note="Description of Artificial Sequence: Synthetic polynucleotide"
gctgatcagcctcgactgtgccttctagttgccagccatctgttgtttgcccctcccccgtgccttccttgaccctggaaggtgccactcccactgtcctttcctaataaaatgaggaaattgcatcgcattgtctgagtaggtgtcattctattctggggggtggggtggggcaggacagcaagggggaggattgggaagacaatagcaggcatgctggggatgcggtgggctctatgg

SEQ ID NO: 34 - DNA, 49 bp, Artificial Sequence
  source: /note="Description of Artificial Sequence: Synthetic oligonucleotide"
aataaaatatctttattttcattacatctgtgtgttggttttttgtgtg

SEQ ID NO: 35 - DNA, 48 bp, Artificial Sequence
  source: /note="Description of Artificial Sequence: Synthetic oligonucleotide"
cggcaataaaaagacagaataaaacgcacggtgttgggtcgtttgttc

SEQ ID NO: 36 - DNA, 225 bp, Artificial Sequence
  source: /note="Description of Artificial Sequence: Synthetic polynucleotide"
ctgtgccttctagttgccagccatctgttgtttgcccctcccccgtgccttccttgaccctggaaggtgccactcccactgtcctttcctaataaaatgaggaaattgcatcgcattgtctgagtaggtgtcattctattctggggggtggggtggggcaggacagcaagggggaggattgggaagacaatagcaggcatgctggggatgcggtgggctctatgg

SEQ ID NO: 37 - DNA, 589 bp, Artificial Sequence
  source: /note="Description of Artificial Sequence: Synthetic polynucleotide"
aatcaacctctggattacaaaatttgtgaaagattgactggtattcttaactatgttgctccttttacgctatgtggatacgctgctttaatgcctttgtatcatgctattgcttcccgtatggctttcattttctcctccttgtataaatcctggttgctgtctctttatgaggagttgtggcccgttgtcaggcaacgtggcgtggtgtgcactgtgtttgctgacgcaacccccactggttggggcattgccaccacctgtcagctcctttccgggactttcgctttccccctccctattgccacggcggaactcatcgccgcctgccttgcccgctgctggacaggggctcggctgttgggcactgacaattccgtggtgttgtcggggaagctgacgtcctttccatggctgctcgcctgtgttgccacctggattctgcgcgggacgtccttctgctacgtcccttcggccctcaatccagcggaccttccttcccgcggcctgctgccggctctgcggcctcttccgcgtcttcgccttcgccctcagacgagtcggatctccctttgggccgcctccccgc

SEQ ID NO: 38 - protein, 158 aa, Artificial Sequence
  source: /note="Description of Artificial Sequence: Synthetic polypeptide"
ISLIAALAVDHVIGMETVMPWNLPADLAWFKRNTLNKPVIMGRHTWESIGRPLPGRKNIILSSQPSTDDRVTWVKSVDEAIAACGDVPEIMVIGGGRVYEQFLPKAQKLYLTHIDAEVEGDTHFPDYEPDDWESVFSEFHDADAQNSHSYCFEILERR

SEQ ID NO: 39 - DNA, 48 bp, Artificial Sequence
  source: /note="Description of Artificial Sequence: Synthetic oligonucleotide"
gcctgcaagaactggttcagcagcctgagccacttcgtgatccacctg

SEQ ID NO: 40 - protein, 23 aa, Artificial Sequence
  source: /note="Description of Artificial Sequence: Synthetic peptide"
FQCNQCGASFTQKGNLLRHIKLH

SEQ ID NO: 41 - DNA, 78 bp, Artificial Sequence
  source: /note="Description of Artificial Sequence: Synthetic oligonucleotide"
ggatcccgggctgactacaaagaccatgacggtgattataaagatcatgacatcgactacaaggatgacgatgacaag

SEQ ID NO: 42 - DNA, 21 bp, Artificial Sequence
  source: /note="Description of Artificial Sequence: Synthetic oligonucleotide"
aggagcaccaggaacttgcca

SEQ ID NO: 43 - DNA, 21 bp, Artificial Sequence
  source: /note="Description of Artificial Sequence: Synthetic oligonucleotide"
aagccgaaaaccacgatcatc

SEQ ID NO: 44 - DNA, 21 bp, Artificial Sequence
  source: /note="Description of Artificial Sequence: Synthetic oligonucleotide"
gcgctaccgccgcctgcagaa

SEQ ID NO: 45 - DNA, 21 bp, Artificial Sequence
  source: /note="Description of Artificial Sequence: Synthetic oligonucleotide"
tttcggcttggagtacatcgt

SEQ ID NO: 46 - DNA, 21 bp, Artificial Sequence
  source: /note="Description of Artificial Sequence: Synthetic oligonucleotide"
ccggatgctgctgccgctacc

SEQ ID NO: 47 - DNA, 21 bp, Artificial Sequence
  source: /note="Description of Artificial Sequence: Synthetic oligonucleotide"
tgctgccgctaccgaggatgg

SEQ ID NO: 48 - DNA, 50 bp, Artificial Sequence
  source: /note="Description of Artificial Sequence: Synthetic oligonucleotide"
tcctcatcttggaattcgtgatgcgaacatcacgaattccaagatgagga

SEQ ID NO: 49 - DNA, 50 bp, Artificial Sequence
  source: /note="Description of Artificial Sequence: Synthetic oligonucleotide"
cgccttactgggcatctctttctcgaaagaaagagatgcccagtaaggcg

SEQ ID NO: 50 - DNA, 46 bp, Artificial Sequence
  source: /note="Description of Artificial Sequence: Synthetic oligonucleotide"
ctggtactactatgacagtatcgaaatactgtcatagtagtaccag

SEQ ID NO: 51 - DNA, 46 bp, Artificial Sequence
  source: /note="Description of Artificial Sequence: Synthetic oligonucleotide"
aagtagcagaggagaagagctcgaaagctcttctcctctgctactt

SEQ ID NO: 52 - DNA, 46 bp, Artificial Sequence
  source: /note="Description of Artificial Sequence: Synthetic oligonucleotide"
aagacagtcatccgctccatccgaagatggagcggatgactgtctt

SEQ ID NO: 53 - DNA, 46 bp, Artificial Sequence
  source: /note="Description of Artificial Sequence: Synthetic oligonucleotide"
aaggacgtcattgagcagtaccgaagtactgctcaatgacgtcctt

SEQ ID NO: 54 - DNA, 46 bp, Artificial Sequence
  source: /note="Description of Artificial Sequence: Synthetic oligonucleotide"
gccggatcaagagcctgcaaacgaatttgcaggctcttgatccggc

SEQ ID NO: 55 - DNA, 46 bp, Artificial Sequence
  source: /note="Description of Artificial Sequence: Synthetic oligonucleotide"
ggtggatgaaatcagcatgatcgaaatcatgctgatttcatccacc

SEQ ID NO: 56 - DNA, 21 bp, Artificial Sequence
  source: /note="Description of Artificial Sequence: Synthetic oligonucleotide"
ttgagaatcctgatggagcgg

SEQ ID NO: 57 - DNA, 19 bp, Artificial Sequence
  source: /note="Description of Artificial Sequence: Synthetic oligonucleotide"
ttgagtctcagagatgccc

SEQ ID NO: 58 - DNA, 21 bp, Artificial Sequence
  source: /note="Description of Artificial Sequence: Synthetic oligonucleotide"
ttctcgaagtgcttctgccgg

SEQ ID NO: 59 - DNA, 21 bp, Artificial Sequence
  source: /note="Description of Artificial Sequence: Synthetic oligonucleotide"
ttctccaccttgaccacgcgt

SEQ ID NO: 60 - DNA, 21 bp, Artificial Sequence
  source: /note="Description of Artificial Sequence: Synthetic oligonucleotide"
atactgtcatagtagtaccag

SEQ ID NO: 61 - DNA, 21 bp, Artificial Sequence
  source: /note="Description of Artificial Sequence: Synthetic oligonucleotide"
tagtcggaggtgatgtcgggg

SEQ ID NO: 62 - DNA, 21 bp, Artificial Sequence
  source: /note="Description of Artificial Sequence: Synthetic oligonucleotide"
ttgagaatcctgatggagcgg

SEQ ID NO: 63 - DNA, 21 bp, Artificial Sequence
  source: /note="Description of Artificial Sequence: Synthetic oligonucleotide"
ttgagaatcctgatggagcgg

SEQ ID NO: 64 - DNA, 21 bp, Artificial Sequence
  source: /note="Description of Artificial Sequence: Synthetic oligonucleotide"
ttgagaatcctgatggagcgg

SEQ ID NO: 65 - DNA, 21 bp, Artificial Sequence
  source: /note="Description of Artificial Sequence: Synthetic oligonucleotide"
ttgagaatcctgatggagcgg

SEQ ID NO: 66 - DNA, 21 bp, Artificial Sequence
  source: /note="Description of Artificial Sequence: Synthetic oligonucleotide"
ttgagaatcctgatggagcgg

SEQ ID NO: 67 - DNA, 21 bp, Artificial Sequence
  source: /note="Description of Artificial Sequence: Synthetic oligonucleotide"
ttgagaatcctgatggagcgg

SEQ ID NO: 68 - DNA, 21 bp, Artificial Sequence
  source: /note="Description of Artificial Sequence: Synthetic oligonucleotide"
ttgagaatcctgatggagcgg

SEQ ID NO: 69 - DNA, 21 bp, Artificial Sequence
  source: /note="Description of Artificial Sequence: Synthetic oligonucleotide"
ttgagaatcctgatggagcgg

SEQ ID NO: 70 - DNA, 21 bp, Artificial Sequence
  source: /note="Description of Artificial Sequence: Synthetic oligonucleotide"
ttgagaatcctgatggagcgg

SEQ ID NO: 71 - skipped

SEQ ID NO: 72 - RNA, 21 nt, Artificial Sequence
  source: /note="Description of Artificial Sequence: Synthetic oligonucleotide"
ccgcuccaucaggauucucaa

SEQ ID NO: 73 - RNA, 21 nt, Artificial Sequence
  source: /note="Description of Artificial Sequence: Synthetic oligonucleotide"
ccgggcaucucugagacucaa

SEQ ID NO: 74 - RNA, 21 nt, Artificial Sequence
  source: /note="Description of Artificial Sequence: Synthetic oligonucleotide"
ccggcagaagcacuucgagaa

SEQ ID NO: 75 - RNA, 21 nt, Artificial Sequence
  source: /note="Description of Artificial Sequence: Synthetic oligonucleotide"
acgcguggucaagguggagaa

SEQ ID NO: 76 - RNA, 21 nt, Artificial Sequence
  source: /note="Description of Artificial Sequence: Synthetic oligonucleotide"
cugguacuacuaugacaguau

SEQ ID NO: 77 - RNA, 21 nt, Artificial Sequence
  source: /note="Description of Artificial Sequence: Synthetic oligonucleotide"
cccgacaucaccuccgacuac

SEQ ID NO: 78 - RNA, 21 nt, Artificial Sequence
  source: /note="Description of Artificial Sequence: Synthetic oligonucleotide"
ccguucugucaggauucugaa

SEQ ID NO: 79 - RNA, 21 nt, Artificial Sequence
  source: /note="Description of Artificial Sequence: Synthetic oligonucleotide"
ccgggccucucuaagacucaa

SEQ ID NO: 80 - RNA, 21 nt, Artificial Sequence
  source: /note="Description of Artificial Sequence: Synthetic oligonucleotide"
caggcagaagcacuuugagaa

SEQ ID NO: 81 - RNA, 21 nt, Artificial Sequence
  source: /note="Description of Artificial Sequence: Synthetic oligonucleotide"
gcgcguagucaagguggaaaa

SEQ ID NO: 82 - RNA, 21 nt, Artificial Sequence
  source: /note="Description of Artificial Sequence: Synthetic oligonucleotide"
cugguauuacuaugacagcau

SEQ ID NO: 83 - RNA, 21 nt, Artificial Sequence
  source: /note="Description of Artificial Sequence: Synthetic oligonucleotide"
ccccgacaucaccucggacua

SEQ ID NO: 84 - RNA, 31 nt, Artificial Sequence
  source: /note="Description of Artificial Sequence: Synthetic oligonucleotide"
augauuuccaccaucaggauucucccaugcc

SEQ ID NO: 85 - RNA, 31 nt, Artificial Sequence
  source: /note="Description of Artificial Sequence: Synthetic oligonucleotide"
agccucagggcaucucugagacacaggggca

SEQ ID NO: 86 - RNA, 31 nt, Artificial Sequence
  source: /note="Description of Artificial Sequence: Synthetic oligonucleotide"
cagcacaggcagaagcacuuugagaagaggc

SEQ ID NO: 87 - RNA, 31 nt, Artificial Sequence
  source: /note="Description of Artificial Sequence: Synthetic oligonucleotide"
gacaucucaguggucaagguggaggacagcu

SEQ ID NO: 88 - RNA, 31 nt, Artificial Sequence
  source: /note="Description of Artificial Sequence: Synthetic oligonucleotide"
gccuugcgguacuacuaugacaagaacauca

SEQ ID NO: 89 - RNA, 31 nt, Artificial Sequence
  source: /note="Description of Artificial Sequence: Synthetic oligonucleotide"
caguggccgacaucaccuccaccugccccac

SEQ ID NO: 90 - DNA, 2085 bp, Homo sapiens
atggccgaggcccccccgcgccgcctcggcctgggtcccccgcccggggacgccccccgcgcggagctagtggcgctcacggccgtgcagagcgaacagggcgaggcgggcgggggcggctccccgcgccgcctcggcctcctgggcagccccctgccgccgggcgcgcccctccctgggccgggctccggctcgggctccgcctgcggccagcgctcctcggccgcgcacaagcgctaccgccgcctgcagaactgggtctacaacgtgctggagcggccccgcggctgggccttcgtctaccacgtcttcatatttttgctggtcttcagctgcctggtgctgtctgtgctgtccactatccaggagcaccaggaacttgccaacgagtgtctcctcatcttggaattcgtgatgatcgtggttttcggcttggagtacatcgtccgggtctggtccgccggatgctgctgccgctaccgaggatggcagggtcgcttccgctttgccagaaagcccttctgtgtcatcgacttcatcgtgttcgtggcctcggtggccgtcatcgccgcgggtacccagggcaacatcttcgccacgtccgcgctgcgcagcatgcgcttcctgcagatcctgcgcatggtgcgcatggaccgccgcggcggcacctggaagctgctgggctcagtggtctacgcgcatagcaaggagctgatcaccgcctggtacatcgggttcctggtgctcatcttcgcctccttcctggtctacctggctgagaaggacgccaactccgacttctcctcctacgccgactcgctctggtgggggacgattacattgacaaccatcggctatggtgacaagacaccgcacacatggctgggcagggtcctggctgctggcttcgccttactgggcatctctttctttgccctgcctgccggcatcctaggctccggctttgccctgaaggtccaggagcagcaccggcagaagcacttcgagaagcggaggatgccggcagccaacctcatccaggctgcctggcgcctgtactccaccgatatgagccgggcctacctgacagccacctggtactactatgacagtatcctcccatccttcagagagctggccctcttgtttgagcacgtgcaacgggcccgcaatgggggcctacggcccctggaggtgcggcgggcgccggtacccgacggagcaccctcccgttacccgcccgttgccacctgccaccggccgggcagcacctccttctgccctggggaaagcagccggatgggcatcaaagaccgcatccgcatgggcagctcccagcggcggacgggtccttccaagcagcatctggcacctccaacaatgcccacctccccaagcagcgagcaggtgggtgaggccaccagccccaccaaggtgcaaaagagctggagcttcaatgaccgcacccgcttccgggcatctctgagactcaaaccccgcacctctgctgaggatgccccctcagaggaagtagcagaggagaagagctaccagtgtgagctcacggtggacgacatcatgcctgctgtgaagacagtcatccgctccatcaggattctcaagttcctggtggccaaaaggaaattcaaggagacactgcgaccgtacgacgtgaaggacgtcattgagcagtactcagcaggccacctggacatgctgggccggatcaagagcctgcaaactcgggtggaccaaattgtgggtcgggggcccggggacaggaaggcccgggagaagggcgacaaggggccctccgacgcggaggtggtggatgaaatcagcatgatgggacgcgtggtcaaggtggagaagcaggtgcagtccatcgagcacaagctggacctgctgttgggcttctattcgcgctgcctgcgctctggcacctcggccagcctgggcgccgtgcaagtgccgctgttcgaccccgacatcacctccgactaccacagccctgtggaccacgaggacatctccgtctccgcacagacgctcagcatctcccgctcggtcagcaccaacatggac

SEQ ID NO: 91 - DNA, 2088 bp, Mus musculus
atggccgaggcccccccgcgccgcctcggcctgggccccccgcccggggacgccccccgcgcggagttggtggcgctcacggccgtgcagagtgaacagggcgaggcgggcgggggcggctctccgcgtcgcctcggccttctgggcagccccctgccgccgggcgcgcccctccctgggccgggctccggctcgggctccgcctgcggcggccagcgctcctccgccgcgcagaagcgctaccgccgcctgcagaactgggtctacaacgtgctggagcggccccgcgggtgggccttcgtctaccacgtcttcatatttttgctagtcttcagctgcctggtgctgtctgtactgtccaccatccaggagcaccaggaacttgccaacgagtgtctccttatcttggaattcgtgatgattgtggtctttggcttggagtatataatccgtgtctggtcggccggatgctgttgtcgctacagaggatggcagggacgctttcgcttcgccaggaaacccttctgtgtcatcgacttcatcgtgttcgtggcctcggtggcagtgatagctgcgggcacacaaggcaacatctttgctacgtccgcgttgcgcagtatgcgcttcctacagatcctgcgcatggtgcgtatggatcgccgcggtggcacctggaagctgttgggatccgtggtctatgcgcacagtaaggagctgatcaccgcctggtacatcgggttcctggtgctcatctttgcctctttcctggtctacctggctgagaaggatgccaactctgacttctcctcctatgccgactcgctctggtgggggacgatcacactgacgaccattggctatggtgacaagacgccacatacatggctgggcagggttctggctgccggcttcgccttactgggcatctccttctttgccctgcctgccggcatcctgggctctggctttgccctgaaggtccaggagcagcacaggcagaagcactttgagaagcgcaggatgccagcagctaatctcatccaggctgcgtggcgcctgtactccacggacacaagccgggcctatttgacagccacctggtattactatgacagcattctcccatctttcagagagctggccctcttgtttgagcacatacaacgggcccgcaatgggggcttacggcccctggaggtgaggcgggcgccagtacctgatggagcgccctctcgctacccgcccgttgccacctgccaccggccaggcagtgcctccttctgccctggggaaagcagccggatgggcatcaaagaccgaatccgcataagcagctcccagaagcggacaggcccctccaagcagcatctggcccctccgccgattcccacctcgccaagcagtgagcaggtgggcgaggcatccagccccagcaaggtgcagaaaagctggagcttcaatgaccgcacccgcttccgggcctctctaagactcaagcctcgctgctctgctgaggagggcccctcagaggaagtggccgaggagaagagctaccagtgtgagcttacggtggatgatgtcatgcctgctgtgaagacggtcatccgttctgtcaggattctgaagttcctggtagccaaaaggaaattcaaggagacgctgcggccatatgatgtgaaggatgtcattgagcagtattcagcaggacacctggacatgctgggacgaatcaagagcctgcaagcccgggtggaccaaattgtgggtcggggccctggggaccgcaagactcgggagaagggcgataagggtccttcagacacggaggcagtggatgaaatcagcatgatggggcgcgtagtcaaggtggaaaagcaggtgcagtccatcgaacataagttggatctgctgctgggcttctactcgcgctgcctccgctctggcacctcggccagcctgggcactgtgcaagtgccgctcttcgaccccgacatcacctcggactaccacagccctgtagaccacgaggacatctctgtctccgcacagacgctcagcatctctcgctcagtcagcaccaacatggac

SEQ ID NO: 92 - protein, 696 aa, Mus musculus
MAEAPPRRLGLGPPPGDAPRAELVALTAVQSEQGEAGGGGSPRRLGLLGSPLPPGAPLPGPGSGSGSACGGQRSSAAQKRYRRLQNWVYNVLERPRGWAFVYHVFIFLLVFSCLVLSVLSTIQEHQELANECLLILEFVMIVVFGLEYIIRVWSAGCCCRYRGWQGRFRFARKPFCVIDFIVFVASVAVIAAGTQGNIFATSALRSMRFLQILRMVRMDRRGGTWKLLGSVVYAHSKELITAWYIGFLVLIFASFLVYLAEKDANSDFSSYADSLWWGTITLTTIGYGDKTPHTWLGRVLAAGFALLGISFFALPAGILGSGFALKVQEQHRQKHFEKRRMPAANLIQAAWRLYSTDTSRAYLTATWYYYDSILPSFRELALLFEHIQRARNGGLRPLEVRRAPVPDGAPSRYPPVATCHRPGSASFCPGESSRMGIKDRIRISSSQKRTGPSKQHLAPPPIPTSPSSEQVGEASSPSKVQKSWSFNDRTRFRASLRLKPRCSAEEGPSEEVAEEKSYQCELTVDDVMPAVKTVIRSVRILKFLVAKRKFKETLRPYDVKDVIEQYSAGHLDMLGRIKSLQARVDQIVGRGPGDRKTREKGDKGPSDTEAVDEISMMGRVVKVEKQVQSIEHKLDLLLGFYSRCLRSGTSASLGTVQVPLFDPDITSDYHSPVDHEDISVSAQTLSISRSVSTNMD

SEQ ID NO: 93 - RNA, 5000 nt, Artificial Sequence
  source: /note="Description of Artificial Sequence: Synthetic polynucleotide"
  misc_feature (1)..(5000): /note="This sequence may encompass 50-5000 nucleotides"
  source: /note="See specification as filed for detailed description of substitutions and preferred embodiments"
aaaaaaaaaaaaaaaaaaaaaaaaaaaaaaaaaaaaaaaaaaaaaaaaaaaaaaaaaaaaaaaaaaaaaaaaaaaaaaaaaaaaaaaaaaaaaaaaaaaaaaaaaaaaaaaaaaaaaaaaaaaaaaaaaaaaaaaaaaaaaaaaaaaaaaaaaaaaaaaaaaaaaaaaaaaaaaaaaaaaaaaaaaaaaaaaaaaaaaaaaaaaaaaaaaaaaaaaaaaaaaaaaaaaaaaaaaaaaaaaaaaaaaaaaaaaaaaaaaaaaaaaaaaaaaaaaaaaaaaaaaaaaaaaaaaaaaaaaaaaaaaaaaaaaaaaaaaaaaaaaaaaaaaaaaaaaaaaaaaaaaaaaaaaaaaaaaaaaaaaaaaaaaaaaaaaaaaaaaaaaaaaaaaaaaaaaaaaaaaaaaaaaaaaaaaaaaaaaaaaaaaaaaaaaaaaaaaaaaaaaaaaaaaaaaaaaaaaaaaaaaaaaaaaaaaaaaaaaaaaaaaaaaaaaaaaaaaaaaaaaaaaaaaaaaaaaaaaaaaaaaaaaaaaaaaaaaaaaaaaaaaaaaaaaaaaaaaaaaaaaaaaaaaaaaaaaaaaaaaaaaaaaaaaaaaaaaaaaaaaaaaaaaaaaaaaaaaaaaaaaaaaaaaaaaaaaaaaaaaaaaaaaaaaaaaaaaaaaaaaaaaaaaaaaaaaaaaaaaaaaaaaaaaaaaaaaaaaaaaaaaaaaaaaaaaaaaaaaaaaaaaaaaaaaaaaaaaaaaaaaaaaaaaaaaaaaaaaaaaaaaaaaaaaaaaaaaaaaaaaaaaaaaaaaaaaaaaaaaaaaaaaaaaaaaaaaaaaaaaaaaaaaaaaaaaaaaaaaaaaaaaaaaaaaaaaaaaaaaaaaaaaaaaaaaaaaaaaaaaaaaaaaaaaaaaaaaaaaaaaaaaaaaaaaaaaaaaaaaaaaaaaaaaaaaaaaaaaaaaaaaaaaaaaaaaaaaaaaaaaaaaaaaaaaaaaaaaaaaaaaaaaaaaaaaaaaaaaaaaaaaaaaaaaaaaaaaaaaaaaaaaaaaaaaaaaaaaaaaaaaaaaaaaaaaaaaaaaaaaaaaaaaaaaaaaaaaaaaaaaaaaaaaaaaaaaaaaaaaaaaaaaaaaaaaaaaaaaaaaaaaaaaaaaaaaaaaaaaaaaaaaaaaaaaaaaaaaaaaaaaaaaaaaaaaaaaaaaaaaaaaaaaaaaaaaaaaaaaaaaaaaaaaaaaaaaaaaaaaaaaaaaaaaaaaaaaaaaaaaaaaaaaaaaaaaaaaaaaaaaaaaaaaaaaaaaaaaaaaaaaaaaaaaaaaaaaaaaaaaaaaaaaaaaaaaaaaaaaaaaaaaaaaaaaaaaaaaaaaaaaaaaaaaaaaaaaaaaaaaaaaaaaaaaaaaaaaaaaaaaaaaaaaaaaaaaaaaaaaaaaaaaaaaaaaaaaaaaaaaaaaaaaaaaaaaaaaaaaaaaaaaaaaaaaaaaaaaaaaaaaaaaaaaaaaaaaaaaaaaaaaaaaaaaaaaaaaaaaaaaaaaaaaaaaaaaaaaaaaaaaaaaaaaaaaaaaaaaaaaaaaaaaaaaaaaaaaaaaaaaaaaaaaaaaaaaaaaaaaaaaaaaaaaaaaaaaaaaaaaaaaaaaaaaaaaaaaaaaaaaaaaaaaaaaaaaaaaaaaaaaaaaaaaaaaaaaaaaaaaaaaaaaaaaaaaaaaaaaaaaaaaaaaaaaaaaaaaaaaaaaaaaaaaaaaaaaaaaaaaaaaaaaaaaaaaaaaaaaaaaaaaaaaaaaaaaaaaaaaaaaaaaaaaaaaaaaaaaaaaaaaaaaaaaaaaaaaaaaaaaaaaaaaaaaaaaaaaaaaaaaaaaaaaaaaaaaaaaaaaaaaaaaaaaaaaaaaaaaaaaaaaaaaaaaaaaaaaaaaaaaaaaaaaaaaaaaaaaaaaaaaaaaaaaaaaaaaaaaaaaaaaaaaaaaaaaaaaaaaaaaaaaaaaaaaaaaaaaaaaaaaaaaaaaaaaaaaaaaaaaaaaaaaaaaaaaaaaaaaaaaaaaaaaaaaaaaaaaaaaaaaaaaaaaaaaaaaaaaaaaaaaaaaaaaaaaaaaaaaaaaaaaaaaaaaaaaaaaaaaaaaaaaaaaaaaaaaaaaaaaaaaaaaaaaaaaaaaaaaaaaaaaaaaaaaaaaaaaaaaaaaaaaaaaaaaaaaaaaaaaaaaaaaaaaaaaaaaaaaaaaaaaaaaaaaaaaaaaaaaaaaaaaaaaaaaaaaaaaaaaaaaaaaaaaaaaaaaaaaaaaaaaaaaaaaaaaaaaaaaaaaaaaaaaaaaaaaaaaaaaaaaaaaaaaaaaaaaaaaaaaaaaaaaaaaaaaaaaaaaaaaaaaaaaaaaaaaaaaaaaaaaaaaaaaaaaaaaaaaaaaaaaaaaaaaaaaaaaaaaaaaaaaaaaaaaaaaaaaaaaaaaaaaaaaaaaaaaaaaaaaaaaaaaaaaaaaaaaaaaaaaaaaaaaaaaaaaaaaaaaaaaaaaaaaaaaaaaaaaaaaaaaaaaaaaaaaaaaaaaaaaaaaaaaaaaaaaaaaaaaaaaaaaaaaaaaaaaaaaaaaaaaaaaaaaaaaaaaaaaaaaaaaaaaaaaaaaaaaaaaaaaaaaaaaaaaaaaaaaaaaaaaaaaaaaaaaaaaaaaaaaaaaaaaaaaaaaaaaaaaaaaaaaaaaaaaaaaaaaaaaaaaaaaaaaaaaaaaaaaaaaaaaaaaaaaaaaaaaaaaaaaaaaaaaaaaaaaaaaaaaaaaaaaaaaaaaaaaaaaaaaaaaaaaaaaaaaaaaaaaaaaaaaaaaaaaaaaaaaaaaaaaaaaaaaaaaaaaaaaaaaaaaaaaaaaaaaaaaaaaaaaaaaaaaaaaaaaaaaaaaaaaaaaaaaaaaaaaaaaaaaaaaaaaaaaaaaaaaaaaaaaaaaaaaaaaaaaaaaaaaaaaaaaaaaaaaaaaaaaaaaaaaaaaaaaaaaaaaaaaaaaaaaaaaaaaaaaaaaaaaaaaaaaaaaaaaaaaaaaaaaaaaaaaaaaaaaaaaaaaaaaaaaaaaaaaaaaaaaaaaaaaaaaaaaaaaaaaaaaaaaaaaaaaaaaaaaaaaaaaaaaaaaaaaaaaaaaaaaaaaaaaaaaaaaaaaaaaaaaaaaaaaaaaaaaaaaaaaaaaaaaaaaaaaaaaaaaaaaaaaaaaaaaaaaaaaaaaaaaaaaaaaaaaaaaaaaaaaaaaaaaaaaaaaaaaaaaaaaaaaaaaaaaaaaaaaaaaaaaaaaaaaaaaaaaaaaaaaaaaaaaaaaaaaaaaaaaaaaaaaaaaaaaaaaaaaaaaaaaaaaaaaaaaaaaaaaaaaaaaaaaaaaaaaaaaaaaaaaaaaaaaaaaaaaaaaaaaaaaaaaaaaaaaaaaaaaaaaaaaaaaaaaaaaaaaaaaaaaaaaaaaaaaaaaaaaaaaaaaaaaaaaaaaaaaaaaaaaaaaaaaaaaaaaaaaaaaaaaaaaaaaaaaaaaaaaaaaaaaaaaaaaaaaaaaaaaaaaaaaaaaaaaaaaaaaaaaaaaaaaaaaaaaaaaaaaaaaaaaaaaaaaaaaaaaaaaaaaaaaaaaaaaaaaaaaaaaaaaaaaaaaaaaaaaaaaaaaaaaaaaaaaaaaaaaaaaaaaaaaaaaaaaaaaaaaaaaaaaaaaaaaaaaaaaaaaaaaaaaaaaaaaaaaaaaaaaaaaaaaaaaaaaaaaaaaaaaaaaaaaaaaaaaaaaaaaaaaaaaaaaaaaaaaaaaaaaaaaaaaaaaaaaaaaaaaaaaaaaaaaaaaaaaaaaaaaaaaaaaaaaaaaaaaaaaaaaaaaaaaaaaaaaaaaaaaaaaaaaaaaaaaaaaaaaaaaaaaaaaaaaaaaaaaaaaaaaaaaaaaaaaaaaaaaaaaaaaaaaaaaaaaaaaaaaaaaaaaaaaaaaaaaaaaaaaaaaaaaaaaaaaaaaaaaaaaaaaaaaaaaaaaaaaaaaaaaaaaaaaaaaaaaaaaaaaaaaaaaaaaaaaaaaaaaaaaaaaaaaaaaaaaaaaaaaaaaaaaaaaaaaaaaaaaaaaaaaaaaaaaaaaaaaaaaaaaaaaaaaaaaaaaaaaaaaaaaaaaaaaaaaaaaaaaaaaaaaaaaaaaaaaaaaaaaaaaaaaaaaaaaaaaaaaaaaaaaaaaaaaaaaaaaaaaaaaaaaaaaaaaaaaaaaaaaaaaaaaaaaaaaaaaaaaaaaaaaaaaaaaaaaaaaaaaaaaaaaaaaaaaaaaaaaaaaaaaaaaaaaaaaaaaaaaaaaaaaaaaaaaaaaaaaaaaaaaaaaaaaaaaaaaaaaaaaaaaaaaaaaaaaaaaaaaaaaaaaaaaaaaaaaaaaaaaaaaaaaaaaaaaaaaaaaaaaaaaaaaaaaaaaaaaaaaaaaaaaaaaaaaaaaaaaaaaaaaaaaaaaaaaaaaaaaaaaaaaaaaaaaaaaaaaaaaaaaaaaaaaaaaaaaaaaaaaaaaaaaaaaaaaaaaaaaaaaaaaaaaaaaaaaaaaaaaaaaaaaaaaaaaaaaaaaaaaaaaaaaaaaaaaaaaaaaaaaaaaaaaaaaaaaaaaaaaaaaaaaaaaaaaaaaaaaaaaaaaaaaaaaaaaaaaaaaaaaaaaaaaaaaaaaaaaaaaaaaaaaaaaaaaaaaaaaaaaaaaaaaaaaaaaaaaaaaaaaaaaaaaaaaaaaaaaaaaaaaaaaaaaaaaaaaaaaaaaaaaaaaaaaaaaaaaaaaaaaaaaaaaaaaaaaaaaaaaaaaaaaaaaaaaaaaaaaaaaaaaaaaaaaaaaaaaaaaaaaaaaaaaaaaaaaaaaaaaaaaaaaaaaaaaaaaaaaaaaaaaaaaaaaaaaaaaaaaaaaaaaaaaaaaaaaaaaaaaaaaaaaaaaaaaaaaaaaaaaaaaaaaaaaaaaaaaaaaaaaaaaaaaaaaaaaaaaaaaaaaaaaaaaaaaaaaaaaaaaaaaaaaaaaaaaaaaaaaaaaaaaaaaaaaaaaaaaaaaaaaaaaaaaaaaaaaaaaaaaaaaaaaaaaaaaaaaaaaaaaaaaaaaaaaaa

SEQ ID NO: 94 - DNA, 17 bp, Artificial Sequence
  source: /note="Description of Artificial Sequence: Synthetic oligonucleotide"
aaataaaatacgaaatg

SEQ ID NO: 95 - DNA, 21 bp, Artificial Sequence
  source: /note="Description of Artificial Sequence: Synthetic oligonucleotide"
ctggtactactatgacagtat

SEQ ID NO: 96 - DNA, 21 bp, Artificial Sequence
  source: /note="Description of Artificial Sequence: Synthetic oligonucleotide"
ttgagtcttagagaggcccgg

SEQ ID NO: 97 - DNA, 21 bp, Artificial Sequence
  source: /note="Description of Artificial Sequence: Synthetic oligonucleotide"
atgctgtcatagtaataccag

SEQ ID NO: 98 - DNA, 304 bp, Artificial Sequence
  source: /note="Description of Artificial Sequence: Synthetic polynucleotide"
cgttacataacttacggtaaatggcccgcctggctgaccgcccaacgacccccgcccattgacgtcaataatgacgtatgttcccatagtaacgccaatagggactttccattgacgtcaatgggtggagtatttacggtaaactgcccacttggcagtacatcaagtgtatcatatgccaagtacgccccctattgacgtcaatgacggtaaatggcccgcctggcattatgcccagtacatgaccttatgggactttcctacttggcagtacatctacgtattagtcatcgctattaccatg

SEQ ID NO: 99 - DNA, 219 bp, Artificial Sequence
  source: /note="Description of Artificial Sequence: Synthetic polynucleotide"
gtgatgcggttttggcagtacatcaatgggcgtggatagcggtttgactcacggggatttccaagtctccaccccattgacgtcaatgggagtttgttttggcaccaaaatcaacgggactttccaaaatgtcgtaacaactccgccccattgacgcaaatgggcggtaggcgtgtacggtgggaggtctatataagcagagctcgtttagtgaaccgt

SEQ ID NO: 100 - DNA, 234 bp, Artificial Sequence
  source: /note="Description of Artificial Sequence: Synthetic polynucleotide"
gtgatgcggttttggcagtacatcaatgggcgtggatagcggtttgactcacggggatttccaagtctccaccccattgacgtcaatgggagtttgttttggcaccaaaatcaacgggactttccaaaatgtcgtaacaactccgccccattgacgcaaatgggcggtaggcgtgtacggtgggaggtctatataagcagagctcgtttagtgaaccgtcgtttagtgaaccgt

SEQ ID NO: 101 - DNA, 277 bp, Artificial Sequence
  source: /note="Description of Artificial Sequence: Synthetic polynucleotide"
gtcgaggtgagccccacgttctgcttcactctccccatctcccccccctccccacccccaattttgtatttatttattttttaattattttgtgcagcgatgggggcggggggggggggggcgcgcgccaggcggggcggggcggggcgaggggcggggcggggcgaggcggagaggtgcggcggcagccaatcagagcggcgcgctccgaaagtttccttttatggcgaggcggcggcggcggcggccctataaaaagcgaagcgcgcggcgggcg

SEQ ID NO: 102 - DNA, 705 bp, Artificial Sequence
  source: /note="Description of Artificial Sequence: Synthetic polynucleotide"
ggagtcgctgcgttgccttcgccccgtgccccgctccgcgccgcctcgcgccgcccgccccggctctgactgaccgcgttactcccacaggtgagcgggcgggacggcccttctcctccgggctgtaattagcgcttggtttaatgacggctcgtttcttttctgtggctgcgtgaaagccttaaagggctccgggagggccctttgtgcgggggggagcggctcggggggtgcgtgcgtgtgtgtgtgcgtggggagcgccgcgtgcggcccgcgctgcccggcggctgtgagcgctgcgggcgcggcgcggggctttgtgcgctccgcgtgtgcgcgaggggagcgcggccgggggcggtgccccgcggtgcgggggggctgcgaggggaacaaaggctgcgtgcggggtgtgtgcgtgggggggtgagcagggggtgtgggcgcggcggtcgggctgtaacccccccctgcacccccctccccgagttgctgagcacggcccggcttcgggtgcggggctccgtgcggggcgtggcgcggggctcgccgtgccgggcggggggtggcggcaggtgggggtgccgggcggggcggggccgcctcgggccggggagggctcgggggaggggcgcggcggcccccggagcgccggcgtctagagcctctgctaaccatgttcatgccttcttctttttcctacag

SEQ ID NO: 103 - DNA, 720 bp, Artificial Sequence
  source: /note="Description of Artificial Sequence: Synthetic polynucleotide"
atggtgagcaagggcgaggagctgttcaccggggtggtgcccatcctggtcgagctggacggcgacgtaaacggccacaagttcagcgtgtccggcgagggcgagggcgatgccacctacggcaagctgaccctgaagttcatctgcaccaccggcaagctgcccgtgccctggcccaccctcgtgaccaccctgacctacggcgtgcagtgcttcagccgctaccccgaccacatgaagcagcacgacttcttcaagtccgccatgcccgaaggctacgtccaggagcgcaccatcttcttcaaggacgacggcaactacaagacccgcgccgaggtgaagttcgagggcgacaccctggtgaaccgcatcgagctgaagggcatcgacttcaaggaggacggcaacatcctggggcacaagctggagtacaactacaacagccacaacgtctatatcatggccgacaagcagaagaacggcatcaaggtgaacttcaagatccgccacaacatcgaggacggcagcgtgcagctcgccgaccactaccagcagaacacccccatcggcgacggccccgtgctgctgcccgacaaccactacctgagcacccagtccgccctgagcaaagaccccaacgagaagcgcgatcacatggtcctgctggagttcgtgaccgccgccgggatcactctcggcatggacgagctgtacaagtaa

SEQ ID NO: 104 - DNA, 127 bp, Artificial Sequence
  source: /note="Description of Artificial Sequence: Synthetic polynucleotide"
catagctcttatgatagcaatgtcagcagtgcctttgagtctcagagatgcccgggttaagattctaaaattatcacgggtattacttgaggctcagaagtaaggttgaccatactctacagttgtg

SEQ ID NO: 105 - DNA, 146 bp, Artificial Sequence
  source: /note="Description of Artificial Sequence: Synthetic polynucleotide"
gagcaggaggaccaaggccctggcgaaggccgtggcctcgttgagtctcagagatgcccggtgtgcaggtcccaatggccgggtattactgagattccacggggacgcgggcctggacgccggcatccgggctcaggacccccctc

SEQ ID NO: 106 - DNA, 148 bp, Artificial Sequence
  source: /note="Description of Artificial Sequence: Synthetic polynucleotide"
gtgtccccagagagcccgcaccagtgccatctgcttggccgatttgagtctcagagatgcccggcttgtgtctctccgctctgagctgtctgtctcgaggctcatatgggaaaagcaggacccgcagctgcgtccgcctcccctgcat

SEQ ID NO: 107 - DNA, 127 bp, Artificial Sequence
  source: /note="Description of Artificial Sequence: Synthetic polynucleotide"
catagctcttatgatagcaatgtcagcagtgcctttctcgaagtgcttctgccgggttaagattctaaaattatcacggtagaaacatcttcgggagaagtaaggttgaccatactctacagttgtg

SEQ ID NO: 108 - DNA, 146 bp, Artificial Sequence
  source: /note="Description of Artificial Sequence: Synthetic polynucleotide"
gagcaggaggaccaaggccctggcgaaggccgtggcctcgttctcgaagtgcttctgccggtgtgcaggtcccaatggccggtagaatcgtttcgagcacggggacgcgggcctggacgccggcatccgggctcaggacccccctc

SEQ ID NO: 109 - DNA, 148 bp, Artificial Sequence
  source: /note="Description of Artificial Sequence: Synthetic polynucleotide"
gtgtccccagagagcccgcaccagtgccatctgcttggccgatttctcgaagtgcttctgccggcttgtgtctctccgctctgagctgtgaggagctttcgggatatgggaaaagcaggacccgcagctgcgtccgcctcccctgcat

SEQ ID NO: 110 - DNA, 127 bp, Artificial Sequence
  source: /note="Description of Artificial Sequence: Synthetic polynucleotide"
catagctcttatgatagcaatgtcagcagtgcctttctccaccttgaccacgcgtgttaagattctaaaattatctcgtgtggtaagtggtggagagaagtaaggttgaccatactctacagttgtg

SEQ ID NO: 111 - DNA, 146 bp, Artificial Sequence
  source: /note="Description of Artificial Sequence: Synthetic polynucleotide"
gagcaggaggaccaaggccctggcgaaggccgtggcctcgttctccaccttgaccacgcgttgtgcaggtcccaatgggcgtgtggtagaggtggagcacggggacgcgggcctggacgccggcatccgggctcaggacccccctc

SEQ ID NO: 112 - DNA, 148 bp, Artificial Sequence
  source: /note="Description of Artificial Sequence: Synthetic polynucleotide"
gtgtccccagagagcccgcaccagtgccatctgcttggccgatttctccaccttgaccacgcgtcttgtgtctctccgctctgaggtgactggttgggtggagatatgggaaaagcaggacccgcagctgcgtccgcctcccctgcat

SEQ ID NO: 113 - DNA, 127 bp, Artificial Sequence
  source: /note="Description of Artificial Sequence: Synthetic polynucleotide"
catagctcttatgatagcaatgtcagcagtgcctatactgtcatagtagtaccaggttaagattctaaaattatcatggtactaatgttggcagtgtaagtaaggttgaccatactctacagttgtg

SEQ ID NO: 114 - DNA, 146 bp, Artificial Sequence
  source: /note="Description of Artificial Sequence: Synthetic polynucleotide"
gagcaggaggaccaaggccctggcgaaggccgtggcctcgatactgtcatagtagtaccagtgtgcaggtcccaatggctggtactaatgtgacagtctcggggacgcgggcctggacgccggcatccgggctcaggacccccctc

SEQ ID NO: 115 - DNA, 148 bp, Artificial Sequence
  source: /note="Description of Artificial Sequence: Synthetic polynucleotide"
gtgtccccagagagcccgcaccagtgccatctgcttggccgatatactgtcatagtagtaccagcttgtgtctctccgctctgagctgtcactgcttgacggtaaatgggaaaagcaggacccgcagctgcgtccgcctcccctgcat

SEQ ID NO: 116 - DNA, 133 bp, Artificial Sequence
  source: /note="Description of Artificial Sequence: Synthetic polynucleotide"
tcctctgagtgctgaaggcttgctgtaggctgtatgctgttgagaatcctgatggagcgggtttttgcctccaactgacccgctcataggattctcaacagtgtatgatgcctgttactagcattcacatgga

SEQ ID NO: 117 - DNA, 133 bp, Artificial Sequence
  source: /note="Description of Artificial Sequence: Synthetic polynucleotide"
tcctctgagtgctgaaggcttgctgtaggctgtatgctgttgagtctcagagatgcccgggtttttgcctccaactgactcgggattctgagactcaacagtgtatgatgcctgttactagcattcacatgga

SEQ ID NO: 118 - DNA, 133 bp, Artificial Sequence
  source: /note="Description of Artificial Sequence: Synthetic polynucleotide"
tcctctgagtgctgaaggcttgctgtaggctgtatgctgttgagtctcagagatgcccgggtttttgcctccaactgactcgggattctgagattcaacagtgtatgatgcctgttactagcattcacatgga

SEQ ID NO: 119 - DNA, 133 bp, Artificial Sequence
  source: /note="Description of Artificial Sequence: Synthetic polynucleotide"
tcctctgagtgctgaaggcttgctgtaggctgtatgctgttgagtctcagagatgcccgggtttttgcctccaactgactcgggatcctgagattcaacagtgtatgatgcctgttactagcattcacatgga

SEQ ID NO: 120 - DNA, 133 bp, Artificial Sequence
  source: /note="Description of Artificial Sequence: Synthetic polynucleotide"
tcctctgagtgctgaaggcttgctgtaggctgtatgctgttgagtctcagagatgcccggaagtttgcctccaactctttcgggatcctgagattcaacagtgtatgatgcctgttactagcattcacatgga

SEQ ID NO: 121 - DNA, 133 bp, Artificial Sequence
  source: /note="Description of Artificial Sequence: Synthetic polynucleotide"
tcctctgagtgctgaaggcttgctgtaggctgtatgctgttctcgaagtgcttctgccgggtttttgcctccaactgactcggcgaatacttcgagaacagtgtatgatgcctgttactagcattcacatgga

SEQ ID NO: 122 - DNA, 133 bp, Artificial Sequence
  source: /note="Description of Artificial Sequence: Synthetic polynucleotide"
tcctctgagtgctgaaggcttgctgtaggctgtatgctgttctccaccttgaccacgcgtgtttttgcctccaactgacatgtgggtaaggtggagaacagtgtatgatgcctgttactagcattcacatgga

SEQ ID NO: 123 - DNA, 133 bp, Artificial Sequence
  source: /note="Description of Artificial Sequence: Synthetic polynucleotide"
tcctctgagtgctgaaggcttgctgtaggctgtatgctgatactgtcatagtagtaccaggtttttgcctccaactgacctggtctatatgacagtatcagtgtatgatgcctgttactagcattcacatgga

SEQ ID NO: 124 - DNA, 133 bp, Artificial Sequence
  source: /note="Description of Artificial Sequence: Synthetic polynucleotide"
tcctctgagtgctgaaggcttgctgtaggctgtatgctgtagtcggaggtgatgtcgggggtttttgcctccaactgactcctgcataccttcgattacagtgtatgatgcctgttactagcattcacatgga

SEQ ID NO: 125 - DNA, 127 bp, Artificial Sequence
  source: /note="Description of Artificial Sequence: Synthetic polynucleotide"
catagctcttatgatagcaatgtcagcagtgcctttgagaatcctgatggagcgggttaagattctaaaattatcacgctccatgagtgattctcagaagtaaggttgaccatactctacagttgtg

SEQ ID NO: 126 - DNA, 146 bp, Artificial Sequence
  source: /note="Description of Artificial Sequence: Synthetic polynucleotide"
gagcaggaggaccaaggccctggcgaaggccgtggcctcgttgagaatcctgatggagcggtgtgcaggtcccaatggccgctccataaggattctccacggggacgcgggcctggacgccggcatccgggctcaggacccccctc

SEQ ID NO: 127 - DNA, 148 bp, Artificial Sequence
  source: /note="Description of Artificial Sequence: Synthetic polynucleotide"
gtgtccccagagagcccgcaccagtgccatctgcttggccgatttgagaatcctgatggagcggcttgtgtctctccgctctgagccgggccatcagattctcatatgggaaaagcaggacccgcagctgcgtccgcctcccctgcat

SEQ ID NO: 128 - DNA, 147 bp, Artificial Sequence
  source: /note="Description of Artificial Sequence: Synthetic polynucleotide"
tgaagttaacaccttcgtggctacagagtttccttagcagagctgttgagaatcctgatggagcgggtgtctaaactatcccgctccatccggattctacatagctactgctaggcaatccttccctcgataaatgtcttggcatcg

SEQ ID NO: 129 - DNA, 121 bp, Artificial Sequence
  source: /note="Description of Artificial Sequence: Synthetic polynucleotide"
gccgctggacccctccactctgctgtggccttgagaatcctgatggagcgggattgctgtcccaaactcccgctccatcggattctcaaggctacagtgaggggcgagctccttctcctgc

SEQ ID NO: 130 - DNA, 149 bp, Artificial Sequence
  source: /note="Description of Artificial Sequence: Synthetic polynucleotide"
ctccccagctcctggggggagctgcttgcctccccccgttttgagaatcctgatggagcggactggtgaggtaacaggatccgccgtccatctttattctcactatggggcgaggactcagccggcaccctgtgcacagccagcgaggg

SEQ ID NO: 131 - DNA, 140 bp, Artificial Sequence
  source: /note="Description of Artificial Sequence: Synthetic polynucleotide"
agggtcggcaggccgcagagtgtgactcctgttctgtgtttgagaatcctgatggagcgggtgaacagtctcagtcccgctcccaggaaatggtcaaaaacagagcagagacagatccacgagggcctccggagcacctt

SEQ ID NO: 132 - DNA, 123 bp, Artificial Sequence
  source: /note="Description of Artificial Sequence: Synthetic polynucleotide"
gaaacagattggaaatgatttgttttgagcgggggttgagaatcctgatggagcgggtttgtcataaaccccgctccctcaggattcccaacctcctctcatttgctatattcaattaagtaa

SEQ ID NO: 133 - DNA, 102 bp, Artificial Sequence
  source: /note="Description of Artificial Sequence: Synthetic polynucleotide"
tgactgccagggcacttgggaatggcaaggttgagaatcctgatggagcggattccatcaggattctcagtcttgctatacccagaaaacgtgccaggaaga

SEQ ID NO: 134 - DNA, 149 bp, Artificial Sequence
  source: /note="Description of Artificial Sequence: Synthetic polynucleotide"
cctgcaggcgccggcgtcctctgagtgctgaaggcttgctgtaggctgtatgctgttgagaatcctgatggagcgggtttttgcctccaactgacccgctcataggattctcaacagtgtatgatgcctgttactagcattcacatgga

SEQ ID NO: 135 - DNA, 146 bp, Artificial Sequence
  source: /note="Description of Artificial Sequence: Synthetic polynucleotide"
gagcaggaggaccaaggccctggcgaaggccgtggcctcgatgctgtcatagtaataccagtgtgcaggtcccaatggctggtattaatgtgacagtctcggggacgcgggcctggacgccggcatccgggctcaggacccccctc

SEQ ID NO: 136 - DNA, 146 bp, Artificial Sequence
  source: /note="Description of Artificial Sequence: Synthetic polynucleotide"
gagcaggaggaccaaggccctggcgaaggccgtggcctcgttgagtcttagagaggcccggtgtgcaggtcccaatggccgggtcttactgagattccacggggacgcgggcctggacgccggcatccgggctcaggacccccctc

SEQ ID NO: 137 - DNA, 146 bp, Artificial Sequence
  source: /note="Description of Artificial Sequence: Synthetic polynucleotide"
gagcaggaggaccaaggccctggcgaaggccgtggcctcgttttccaccttgactacgcgctgtgcaggtcccaatgggcgtgtagtagaggtggagcacggggacgcgggcctggacgccggcatccgggctcaggacccccctc

SEQ ID NO: 138 - DNA, 249 bp, Artificial Sequence
  source: /note="Description of Artificial Sequence: Synthetic polynucleotide"
gtggcctcgatgctgtcatagtaataccagtgtgcaggtcccaatggctggtattaatgtgacagtctcggggacgcgcaattgggtggcctcgatgctgtcatagtaataccagtgtgcaggtcccaatggctggtattaatgtgacagtctcggggacgcgggcgcgcccgtggcctcgatgctgtcatagtaataccagtgtgcaggtcccaatggctggtattaatgtgacagtctcggggacgc

SEQ ID NO: 139 - DNA, 247 bp, Artificial Sequence
  source: /note="Description of Artificial Sequence: Synthetic polynucleotide"
gtggcctcgttgagtcttagagaggcccggtgtgcaggtcccaatggccgggtcttactgagattccacggggacgcgggatccggtggcctcgttgagtcttagagaggcccggtgtgcaggtcccaatggccgggtcttactgagattccacggggacgcgggtacccgtggcctcgttgagtcttagagaggcccggtgtgcaggtcccaatggccgggtcttactgagattccacggggacgc

SEQ ID NO: 140 - DNA, 1650 bp, Artificial Sequence
  source: /note="Description of Artificial Sequence: Synthetic polynucleotide"
atggaagatgccaaaaacattaagaagggcccagcgccattctacccactcgaagacgggaccgccggcgagcagctgcacaaagccatgaagcgctacgccctggtgcccggcaccatcgcctttaccgacgcacatatcgaggtggacattacctacgccgagtacttcgagatgagcgttcggctggcagaagctatgaagcgctatgggctgaatacaaaccatcggatcgtggtgtgcagcgagaatagcttgcagttcttcatgcccgtgttgggtgccctgttcatcggtgtggctgtggccccagctaacgacatctacaacgagcgcgagctgctgaacagcatgggcatcagccagcccaccgtcgtattcgtgagcaagaaagggctgcaaaagatcctcaacgtgcaaaagaagctaccgatcatacaaaagatcatcatcatggatagcaagaccgactaccagggcttccaaagcatgtacaccttcgtgacttcccatttgccacccggcttcaacgagtacgacttcgtgcccgagagcttcgaccgggacaaaaccatcgccctgatcatgaacagtagtggcagtaccggattgcccaagggcgtagccctaccgcaccgcaccgcttgtgtccgattcagtcatgcccgcgaccccatcttcggcaaccagatcatccccgacaccgctatcctcagcgtggtgccatttcaccacggcttcggcatgttcaccacgctgggctacttgatctgcggctttcgggtcgtgctcatgtaccgcttcgaggaggagctattcttgcgcagcttgcaagactataagattcaatctgccctgctggtgcccacactatttagcttcttcgctaagagcactctcatcgacaagtacgacctaagcaacttgcacgagatcgccagcggcggggcgccgctcagcaaggaggtaggtgaggccgtggccaaacgcttccacctaccaggcatccgccagggctacggcctgacagaaacaaccagcgccattctgatcacccccgaaggggacgacaagcctggcgcagtaggcaaggtggtgcccttcttcgaggctaaggtggtggacttggacacaggtaagacactgggtgtgaaccagcgcggcgagctgtgcgtccgtggccccatgatcatgagcggctacgttaacaaccccgaggctacaaacgctctcatcgacaaggacggctggctgcacagcggcgacatcgcctactgggacgaggacgagcacttcttcatcgtggaccggctgaagagcctgatcaaatacaagggctaccaggtagccccagccgaactggagagcatcctgctgcaacaccccaacatcttcgacgccggggtcgccggcctgcccgacgacgatgccggcgagctgcccgccgcagtcgtcgtgctggaacacggtaaaaccatgaccgagaaggagatcgtggactatgtggccagccaggttacaaccgccaagaagctgcgcggtggtgttgtgttcgtggacgaggtgcctaaaggactgaccggcaagttggacgcccgcaagatccgcgagattctcattaaggccaagaagggcggcaagatcgccgtg

SEQ ID NO: 141 - DNA, 54 bp, Artificial Sequence
  source: /note="Description of Artificial Sequence: Synthetic oligonucleotide"
gagggcagaggaagtctgctaacatgcggtgacgtcgaggagaatcctggccca

SEQ ID NO: 142 - DNA, 699 bp, Artificial Sequence
  source: /note="Description of Artificial Sequence: Synthetic polynucleotide"
atggagagcgacgagagcggcctgcccgccatggagatcgagtgccgcatcaccggcaccctgaacggcgtggagttcgagctggtgggcggcggagagggcacccccgagcagggccgcatgaccaacaagatgaagagcaccaaaggcgccctgaccttcagcccctacctgctgagccacgtgatgggctacggcttctaccacttcggcacctaccccagcggctacgagaaccccttcctgcacgccatcaacaacggcggctacaccaacacccgcatcgagaagtacgaggacggcggcgtgctgcacgtgagcttcagctaccgctacgaggccggccgcgtgatcggcgacttcaaggtgatgggcaccggcttccccgaggacagcgtgatcttcaccgacaagatcatccgcagcaacgccaccgtggagcacctgcaccccatgggcgataacgatctggatggcagcttcacccgcaccttcagcctgcgcgacggcggctactacagctccgtggtggacagccacatgcacttcaagagcgccatccaccccagcatcctgcagaacgggggccccatgttcgccttccgccgcgtggaggaggatcacagcaacaccgagctgggcatcgtggagtaccagcacgccttcaagaccccggatgcagatgccggtgaagaataa

SEQ ID NO: 143 - DNA, 122 bp, Artificial Sequence
  source: /note="Description of Artificial Sequence: Synthetic polynucleotide"
taagatacattgatgagtttggacaaaccacaactagaatgcagtgaaaaaaatgctttatttgtgaaatttgtgatgctattgctttatttgtaaccattataagctgcaataaacaagtt

SEQ ID NO: 144 - DNA, 265 bp, Artificial Sequence
  source: /note="Description of Artificial Sequence: Synthetic polynucleotide"
aaggtcgggcaggaagagggcctatttcccatgattccttcatatttgcatatacgatacaaggctgttagagagataattagaattaatttgactgtaaacacaaagatattagtacaaaatacgtgacgtagaaagtaataatttcttgggtagtttgcagttttaaaattatgttttaaaatggactatcatatgcttaccgtaacttgaaagtatttcgatttcttggctttatatatcttgtggaaaggacgaaacaccg

SEQ ID NO: 145 - DNA, 66 bp, Artificial Sequence
  source: /note="Description of Artificial Sequence: Synthetic oligonucleotide"
gactacaaagaccatgacggtgattataaagatcatgacatcgactacaaggatgacgatgacaag

SEQ ID NO: 146 - DNA, 699 bp, Artificial Sequence
  source: /note="Description of Artificial Sequence: Synthetic polynucleotide"
atggtgagcaagggcgaggcagtgatcaaggagttcatgcggttcaaggtgcacatggagggctccatgaacggccacgagttcgagatcgagggcgagggcgagggccgcccctacgagggcacccagaccgccaagctgaaggtgaccaagggtggccccctgcccttctcctgggacatcctgtcccctcagttcatgtacggctccagggccttcatcaagcaccccgccgacatccccgactactataagcagtccttccccgagggcttcaagtgggagcgcgtgatgaacttcgaggacggcggcgccgtgaccgtgacccaggacacctccctggaggacggcaccctgatctacaaggtgaagctccgcggcaccaacttccctcctgacggccccgtaatgcagaagaagacaatgggctgggaagcgtccaccgagcggttgtaccccgaggacggcgtgctgaagggcgacattaagatggccctgcgcctgaaggacggcggccgctacctggcggacttcaagaccacctacaaggccaagaagcccgtgcagatgcccggcgcctacaacgtcgaccgcaagttggacatcacctcccacaacgaggactacaccgtggtggaacagtacgaacgctccgagggccgccactccaccggcggcatggacgagctgtacaagtaa

SEQ ID NO: 147 - DNA, 86 bp, Artificial Sequence
  source: /note="Description of Artificial Sequence: Synthetic oligonucleotide"
gtttaagtactctgtgctggaaacagcacagaatctacttaaacaaggcaaaatgccgtgtttatctcgtcaacttgttggcgaga

SEQ ID NO: 148 - DNA, 149 bp, Artificial Sequence; identical to SEQ ID NO: 130
  source: /note="Description of Artificial Sequence: Synthetic polynucleotide"

SEQ ID NO: 149 - DNA, 6 bp, Artificial Sequence
  source: /note="Description of Artificial Sequence: Synthetic oligonucleotide"
tttttt

SEQ ID NO: 150 - DNA, 21 bp, Artificial Sequence
  source: /note="Description of Artificial Sequence: Synthetic oligonucleotide"
aagccaaagaccacaatcatc

SEQ ID NO: 151 - DNA, 27 bp, Artificial Sequence
  source: /note="Description of Artificial Sequence: Synthetic oligonucleotide"
atggcccctaagaagaagcggaaagtc

SEQ ID NO: 152 - DNA, 3156 bp, Artificial Sequence
  source: /note="Description of Artificial Sequence: Synthetic polynucleotide"
aagcggaactatatcctgggcctcgccatcggcatcaccagcgttggctacggcatcatcgactacgagacacgggacgtgatcgatgccggcgtgcggctgtttaaagaggccaacgtcgagaacaacgagggccgcagatctaagagaggcgccagacggctgaagcggagaagaaggcacagaatccagagagtgaagaagctgctgttcgactacaacctgctgaccgaccacagcgagctgagcggcatcaatccttacgaggccagagtgaagggcctgagccagaagctgagcgaggaagagtttagcgccgctctgctgcacctggccaagagaagaggcgtgcacaacgtgaacgaggtggaagaggacaccggcaacgagctgtccaccaaagagcagatcagccggaacagcaaggccctggaagagaaatacgtggccgaactgcagctggaacggctgaaaaaggatggcgaagtgcggggcagcatcaatcggttcaagaccagcgactacgtgaaagaagccaaacagctgctgaaggtgcagaaggcctaccaccagctggaccagagcttcatcgacacctacatcgacctgctggaaacccggcggacctactatgaaggacctggcgagggaagccccttcggctggaaggacatcaaagaatggtacgagatgctgatgggccactgcacctactttcccgaggaactgcggagcgtgaagtacgcctacaacgccgacctgtacaacgccctgaacgacctgaacaacctcgtgatcacccgggacgagaacgagaagctggaatattacgagaagttccagatcatcgagaacgtgttcaagcagaagaagaaacccacgctgaagcagatcgccaaagagatcctggtcaacgaggaagatatcaagggctacagagtgaccagcaccggcaagcccgagttcaccaacctgaaggtgtaccacgacatcaaggatatcacagcccggaaagagattattgagaacgccgagctgctggaccaaatcgccaagatcctgaccatctaccagagcagcgaggacatccaagaggaactgaccaatctgaactccgagctgacccaagaagagatcgagcagatctctaatctgaaggggtacaccggcacacacaacctgagcctgaaggccatcaacctgatcctggacgagctgtggcacaccaacgacaaccagattgccatcttcaacaggctgaagctggtgcccaagaaggtggacctgtctcagcagaaagaaatccccaccacactggtggacgacttcattctgagccccgtggtcaagaggagcttcatccagagcatcaaagtgatcaacgccatcatcaagaagtacgggctgcccaacgatatcatcatcgagctggcccgcgagaagaactccaaggacgcccagaaaatgatcaacgagatgcagaagaggaaccgccagaccaacgagcggatcgaggaaatcatccggaccaccggcaaagagaacgccaagtacctgatcgagaagatcaagctgcacgacatgcaagagggcaagtgcctgtacagcctggaagccattcctctggaagatctgctgaacaatcccttcaactatgaggtggaccacatcatccccagaagcgtgtccttcgacaacagcttcaacaacaaggtgctcgtgaagcaagaggaagccagcaagaagggcaacagaaccccattccagtacctgagcagcagcgacagcaagatcagctacgaaaccttcaagaagcacatcctgaatctggccaaaggcaagggcagaatcagcaagaccaagaaagaatacctgctcgaggaacgggacatcaacagattcagcgtgcagaaagacttcatcaatcggaacctggtggacaccagatacgccaccagaggcctgatgaatctgctgcggagctacttcagagtgaacaatctggacgtgaaagtcaagtccatcaacggcggcttcaccagctttctgcggcggaagtggaagttcaagaaagagcggaacaagggctataagcaccacgccgaggacgccctgatcattgccaacgccgatttcatcttcaaagagtggaagaaactggacaaggccaaaaaagtgatggaaaaccagatgttcgaggaaaagcaggccgagagcatgcccgagatcgaaaccgagcaagagtacaaagagattttcatcacgccccaccagatcaagcacattaaggacttcaaggactacaagtacagccaccgcgtggacaagaagcccaatagagagctgattaacgacaccctgtactctacccggaaggacgacaagggcaataccctgatcgtcaacaacctgaacggcctgtacgacaaggacaacgacaagctcaagaagctgatcaacaagagccccgagaaactgctgatgtaccaccacgatcctcagacctaccagaaactgaagctcatcatggaacagtacggcgacgagaagaatcccctgtacaagtactacgaggaaaccgggaactacctgaccaagtactccaaaaaggacaatgggcccgtgatcaagaagattaagtattacggcaacaagctgaatgcccacctggacatcaccgacgactaccccaacagcagaaacaaggtggtcaagctgtccctgaagccttacagattcgacgtgtacctggacaacggcgtgtacaagttcgtgaccgtgaagaacctggacgtcatcaaaaaagaaaactactacgaagtcaacagcaagtgctatgaggaagccaagaaactcaagaaaatcagcaaccaggccgagtttatcgcctccttctacaacaacgatctgatcaagatcaacggggagctgtatagagtgatcggcgtgaacaatgacctgctgaaccggatcgaagtgaacatgatcgacatcacctaccgcgagtacctcgagaacatgaacgataagcggcctccacggatcattaagacaatcgccagcaagacgcagagcattaagaagtacagcacagacatcctgggcaacctgtacgaagtgaagtctaagaagcacccgcagattatcaagaaaggc

SEQ ID NO: 153 - DNA, 21 bp, Artificial Sequence
  source: /note="Description of Artificial Sequence: Synthetic oligonucleotide"
cccaagaaaaaacggaaggtt

SEQ ID NO: 154 - DNA, 3156 bp, Artificial Sequence
  source: /note="Description of Artificial Sequence: Synthetic polynucleotide"
aagcggaactatatcctgggcctcgacatcggcatcaccagcgttggctacggcatcatcgactacgagacacgggacgtgatcgatgccggcgtgcggctgtttaaagaggccaacgtcgagaacaacgagggccgcagatctaagagaggcgccagacggctgaagcggagaagaaggcacagaatccagagagtgaagaagctgctgttcgactacaacctgctgaccgaccacagcgagctgagcggcatcaatccttacgaggccagagtgaagggcctgagccagaagctgagcgaggaagagtttagcgccgctctgctgcacctggccaagagaagaggcgtgcacaacgtgaacgaggtggaagaggacaccggcaacgagctgtccaccaaagagcagatcagccggaacagcaaggccctggaagagaaatacgtggccgaactgcagctggaacggctgaaaaaggatggcgaagtgcggggcagcatcaatcggttcaagaccagcgactacgtgaaagaagccaaacagctgctgaaggtgcagaaggcctaccaccagctggaccagagcttcatcgacacctacatcgacctgctggaaacccggcggacctactatgaaggacctggcgagggaagccccttcggctggaaggacatcaaagaatggtacgagatgctgatgggccactgcacctactttcccgaggaactgcggagcgtgaagtacgcctacaacgccgacctgtacaacgccctgaacgacctgaacaacctcgtgatcacccgggacgagaacgagaagctggaatattacgagaagttccagatcatcgagaacgtgttcaagcagaagaagaaacccacgctgaagcagatcgccaaagagatcctggtcaacgaggaagatatcaagggctacagagtgaccagcaccggcaagcccgagttcaccaacctgaaggtgtaccacgacatcaaggatatcacagcccggaaagagattattgagaacgccgagctgctggaccaaatcgccaagatcctgaccatctaccagagcagcgaggacatccaagaggaactgaccaatctgaactccgagctgacccaagaagagatcgagcagatctctaatctgaaggggtacaccggcacacacaacctgagcctgaaggccatcaacctgatcctggacgagctgtggcacaccaacgacaaccagattgccatcttcaacaggctgaagctggtgcccaagaaggtggacctgtctcagcagaaagaaatccccaccacactggtggacgacttcattctgagccccgtggtcaagaggagcttcatccagagcatcaaagtgatcaacgccatcatcaagaagtacgggctgcccaacgatatcatcatcgagctggcccgcgagaagaactccaaggacgcccagaaaatgatcaacgagatgcagaagaggaaccgccagaccaacgagcggatcgaggaaatcatccggaccaccggcaaagagaacgccaagtacctgatcgagaagatcaagctgcacgacatgcaagagggcaagtgcctgtacagcctggaagccattcctctggaagatctgctgaacaatcccttcaactatgaggtggaccacatcatccccagaagcgtgtccttcgacaacagcttcaacaacaaggtgctcgtgaagcaagaggaaaacagcaagaagggcaacagaaccccattccagtacctgagcagcagcgacagcaagatcagctacgaaaccttcaagaagcacatcctgaatctggccaaaggcaagggcagaatcagcaagaccaagaaagaatacctgctcgaggaacgggacatcaacagattcagcgtgcagaaagacttcatcaatcggaacctggtggacaccagatacgccaccagaggcctgatgaatctgctgcggagctacttcagagtgaacaatctggacgtgaaagtcaagtccatcaacggcggcttcaccagctttctgcggcggaagtggaagttcaagaaagagcggaacaagggctataagcaccacgccgaggacgccctgatcattgccaacgccgatttcatcttcaaagagtggaagaaactggacaaggccaaaaaagtgatggaaaaccagatgttcgaggaaaagcaggccgagagcatgcccgagatcgaaaccgagcaagagtacaaagagattttcatcacgccccaccagatcaagcacattaaggacttcaaggactacaagtacagccaccgcgtggacaagaagcccaatagagagctgattaacgacaccctgtactctacccggaaggacgacaagggcaataccctgatcgtcaacaacctgaacggcctgtacgacaaggacaacgacaagctcaagaagctgatcaacaagagccccgagaaactgctgatgtaccaccacgatcctcagacctaccagaaactgaagctcatcatggaacagtacggcgacgagaagaatcccctgtacaagtactacgaggaaaccgggaactacctgaccaagtactccaaaaaggacaatgggcccgtgatcaagaagattaagtattacggcaacaagctgaatgcccacctggacatcaccgacgactaccccaacagcagaaacaaggtggtcaagctgtccctgaagccttacagattcgacgtgtacctggacaacggcgtgtacaagttcgtgaccgtgaagaacctggacgtcatcaaaaaagaaaactactacgaagtcaacagcaagtgctatgaggaagccaagaaactcaagaaaatcagcaaccaggccgagtttatcgcctccttctacaacaacgatctgatcaagatcaacggggagctgtatagagtgatcggcgtgaacaatgacctgctgaaccggatcgaagtgaacatgatcgacatcacctaccgcgagtacctcgagaacatgaacgataagcggcctccacggatcattaagacaatcgccagcaagacgcagagcattaagaagtacagcacagacatcctgggcaacctgtacgaagtgaagtctaagaagcacccgcagattatcaagaaaggc

SEQ ID NO: 155 - DNA, 14 bp, Artificial Sequence
  source: /note="Description of Artificial Sequence: Synthetic oligonucleotide"
gcggccgcacgcgt

SEQ ID NO: 156 - DNA, 44 bp, Artificial Sequence
  source: /note="Description of Artificial Sequence: Synthetic oligonucleotide"
ctcctgggcaacgtgctggttattgtgaccggtcgctagccacc

SEQ ID NO: 157 - DNA, 16 bp, Artificial Sequence
  source: /note="Description of Artificial Sequence: Synthetic oligonucleotide"
cctgcaggcgccggcg

SEQ ID NO: 158 - DNA, 21 bp, Artificial Sequence
  source: /note="Description of Artificial Sequence: Synthetic oligonucleotide"
gagctcgctgatcagcctcga

SEQ ID NO: 159 - DNA, 34 bp, Artificial Sequence
  source: /note="Description of Artificial Sequence: Synthetic oligonucleotide"
aagcttgaattcagctgacgtgcctcggaccgct

SEQ ID NO: 160 - DNA, 38 bp, Artificial Sequence
  source: /note="Description of Artificial Sequence: Synthetic oligonucleotide"
gcggccgcacgcgtctagatcccatatatggagttccg

SEQ ID NO: 161 - DNA, 30 bp, Artificial Sequence
  source: /note="Description of Artificial Sequence: Synthetic oligonucleotide"
cagatcgcctggagacgcaccggtgccacc

SEQ ID NO: 162 - DNA, 9 bp, Artificial Sequence
  source: /note="Description of Artificial Sequence: Synthetic oligonucleotide"
ggctccgga

SEQ ID NO: 163 - DNA, 21 bp, Artificial Sequence
  source: /note="Description of Artificial Sequence: Synthetic oligonucleotide"
gagctcgctgatcagcctcga

SEQ ID NO: 164 - DNA, 6 bp, Artificial Sequence
  source: /note="Description of Artificial Sequence: Synthetic oligonucleotide"
ttaatt

SEQ ID NO: 165 - DNA, 12 bp, Artificial Sequence
  source: /note="Description of Artificial Sequence: Synthetic oligonucleotide"
ggatcccgggct

SEQ ID NO: 166 - DNA, 24 bp, Artificial Sequence
  source: /note="Description of Artificial Sequence: Synthetic oligonucleotide"
taagagctcgctgatcagcctcga

SEQ ID NO: 167 - DNA, 49 bp, Artificial Sequence
  source: /note="Description of Artificial Sequence: Synthetic oligonucleotide"
ctaaagcttgaattcaagcttgaattcagctgacgtgcctcggaccgct

SEQ ID NO: 168 - DNA, 9 bp, Artificial Sequence
  source: /note="Description of Artificial Sequence: Synthetic oligonucleotide"
ggcagcggc

SEQ ID NO: 169 - DNA, 9 bp, Artificial Sequence
  source: /note="Description of Artificial Sequence: Synthetic oligonucleotide"
agcggcgct

SEQ ID NO: 170 - DNA, 37 bp, Artificial Sequence
  source: /note="Description of Artificial Sequence: Synthetic oligonucleotide"
ctaaagcttgaattcagctgacgtgcctcggaccgct

SEQ ID NO: 171 - DNA, 27 bp, Artificial Sequence
  source: /note="Description of Artificial Sequence: Synthetic oligonucleotide"
taataagagctcgctgatcagcctcga

SEQ ID NO: 172 - DNA, 2940 bp, Artificial Sequence
  source: /note="Description of Artificial Sequence: Synthetic polynucleotide"
ctgcgcgctcgctcgctcactgaggccgcccgggcgtcgggcgacctttggtcgcccggcctcagtgagcgagcgagcgcgcagagagggagtggccaactccatcactaggggttcctgcggccgcacgcgtgacattgattattgactagttattaatagtaatcaattacggggtcattagttcatagcccatatatggagttccgcgttacataacttacggtaaatggcccgcctggctgaccgcccaacgacccccgcccattgacgtcaataatgacgtatgttcccatagtaacgccaatagggactttccattgacgtcaatgggtggactatttacggtaaactgcccacttggcagtacatcaagtgtatcatatgccaagtacgccccctattgacgtcaatgacggtaaatggcccgcctggcattatgcccagtacatgaccttatgggactttcctacttggcagtacatctacgtattagtcatcgctattaccatgggtcgaggtgagccccacgttctgcttcactctccccatctcccccccctccccacccccaattttgtatttatttattttttaattattttgtgcagcgatgggggcggggggggggggggcgcgcgccaggcggggcggggcggggcgaggggcggggcggggcgaggcggagaggtgcggcggcagccaatcagagcggcgcgctccgaaagtttccttttatggcgaggcggcggcggcggcggccctataaaaagcgaagcgcgcggcgggcgggagtcgctgcgttgccttcgccccgtgccccgctccgcgccgcctcgcgccgcccgccccggctctgactgaccgcgttactcccacaggtgagcgggcgggacggcccttctcctccgggctgtaattagcgcttggtttaatgacggctcgtttcttttctgtggctgcgtgaaagccttaaagggctccgggagggccctttgtgcgggggggagcggctcggggggtgcgtgcgtgtgtgtgtgcgtggggagcgccgcgtgcggcccgcgctgcccggcggctgtgagcgctgcgggcgcggcgcggggctttgtgcgctccgcgtgtgcgcgaggggagcgcggccgggggcggtgccccgcggtgcgggggggctgcgaggggaacaaaggctgcgtgcggggtgtgtgcgtgggggggtgagcagggggtgtgggcgcggcggtcgggctgtaacccccccctgcacccccctccccgagttgctgagcacggcccggcttcgggtgcggggctccgtgcggggcgtggcgcggggctcgccgtgccgggcggggggtggcggcaggtgggggtgccgggcggggcggggccgcctcgggccggggagggctcgggggaggggcgcggcggcccccggagcgccggcgcatagctcttatgatagcaatgtcagcagtgcctttgagtctcagagatgcccgggttaagattctaaaattatcacgggtattacttgaggctcagaagtaaggttgaccatactctacagttgtgtctagagcctctgctaaccatgttcatgccttcttctttttcctacagctcctgggcaacgtgctggttattgtgaccggtcgctagccaccatggtgagcaagggcgaggagctgttcaccggggtggtgcccatcctggtcgagctggacggcgacgtaaacggccacaagttcagcgtgtccggcgagggcgagggcgatgccacctacggcaagctgaccctgaagttcatctgcaccaccggcaagctgcccgtgccctggcccaccctcgtgaccaccctgacctacggcgtgcagtgcttcagccgctaccccgaccacatgaagcagcacgacttcttcaagtccgccatgcccgaaggctacgtccaggagcgcaccatcttcttcaaggacgacggcaactacaagacccgcgccgaggtgaagttcgagggcgacaccctggtgaaccgcatcgagctgaagggcatcgacttcaaggaggacggcaacatcctggggcacaagctggagtacaactacaacagccacaacgtctatatcatggccgacaagcagaagaacggcatcaaggtgaacttcaagatccgccacaacatcgaggacggcagcgtgcagctcgccgaccactaccagcagaacacccccatcggcgacggccccgtgctgctgcccgacaaccactacctgagcacccagtccgccctgagcaaagaccccaacgagaagcgcgatcacatggtcctgctggagttcgtgaccgccgccgggatcactctcggcatggacgagctgtacaagtaacctgcaggcgccggcgcatagctcttatgatagcaatgtcagcagtgcctttgagtctcagagatgcccgggttaagattctaaaattatcacgggtattacttgaggctcagaagtaaggttgaccatactctacagttgtggagctcgctgatcagcctcgactgtgccttctagttgccagccatctgttgtttgcccctcccccgtgccttccttgaccctggaaggtgccactcccactgtcctttcctaataaaatgaggaaattgcatcgcattgtctgagtaggtgtcattctattctggggggtggggtggggcaggacagcaagggggaggattgggaagacaatagcaggcatgctggggatgcggtgggctctatggaagcttgaattcagctgacgtgcctcggaccgctaggaacccctagtgatggagttggccactccctctctgcgcgctcgctcgctcactgaggccgggcgaccaaaggtcgcccgacgcccgggctttgcccgggcggcctcagtgagcgagcgagcgcgcag

SEQ ID NO: 173 - DNA, 2978 bp, Artificial Sequence
  source: /note="Description of Artificial Sequence: Synthetic polynucleotide"
ctgcgcgctcgctcgctcactgaggccgcccgggcgtcgggcgacctttggtcgcccggcctcagtgagcgagcgagcgcgcagagagggagtggccaactccatcactaggggttcctgcggccgcacgcgtgacattgattattgactagttattaatagtaatcaattacggggtcattagttcatagcccatatatggagttccgcgttacataacttacggtaaatggcccgcctggctgaccgcccaacgacccccgcccattgacgtcaataatgacgtatgttcccatagtaacgccaatagggactttccattgacgtcaatgggtggactatttacggtaaactgcccacttggcagtacatcaagtgtatcatatgccaagtacgccccctattgacgtcaatgacggtaaatggcccgcctggcattatgcccagtacatgaccttatgggactttcctacttggcagtacatctacgtattagtcatcgctattaccatgggtcgaggtgagccccacgttctgcttcactctccccatctcccccccctccccacccccaattttgtatttatttattttttaattattttgtgcagcgatgggggcggggggggggggggcgcgcgccaggcggggcggggcggggcgaggggcggggcggggcgaggcggagaggtgcggcggcagccaatcagagcggcgcgctccgaaagtttccttttatggcgaggcggcggcggcggcggccctataaaaagcgaagcgcgcggcgggcgggagtcgctgcgttgccttcgccccgtgccccgctccgcgccgcctcgcgccgcccgccccggctctgactgaccgcgttactcccacaggtgagcgggcgggacggcccttctcctccgggctgtaattagcgcttggtttaatgacggctcgtttcttttctgtggctgcgtgaaagccttaaagggctccgggagggccctttgtgcgggggggagcggctcggggggtgcgtgcgtgtgtgtgtgcgtggggagcgccgcgtgcggcccgcgctgcccggcggctgtgagcgctgcgggcgcggcgcggggctttgtgcgctccgcgtgtgcgcgaggggagcgcggccgggggcggtgccccgcggtgcgggggggctgcgaggggaacaaaggctgcgtgcggggtgtgtgcgtgggggggtgagcagggggtgtgggcgcggcggtcgggctgtaacccccccctgcacccccctccccgagttgctgagcacggcccggcttcgggtgcggggctccgtgcggggcgtggcgcggggctcgccgtgccgggcggggggtggcggcaggtgggggtgccgggcggggcggggccgcctcgggccggggagggctcgggggaggggcgcggcggcccccggagcgccggcggagcaggaggaccaaggccctggcgaaggccgtggcctcgttgagtctcagagatgcccggtgtgcaggtcccaatggccgggtattactgagattccacggggacgcgggcctggacgccggcatccgggctcaggacccccctctctagagcctctgctaaccatgttcatgccttcttctttttcctacagctcctgggcaacgtgctggttattgtgaccggtcgctagccaccatggtgagcaagggcgaggagctgttcaccggggtggtgcccatcctggtcgagctggacggcgacgtaaacggccacaagttcagcgtgtccggcgagggcgagggcgatgccacctacggcaagctgaccctgaagttcatctgcaccaccggcaagctgcccgtgccctggcccaccctcgtgaccaccctgacctacggcgtgcagtgcttcagccgctaccccgaccacatgaagcagcacgacttcttcaagtccgccatgcccgaaggctacgtccaggagcgcaccatcttcttcaaggacgacggcaactacaagacccgcgccgaggtgaagttcgagggcgacaccctggtgaaccgcatcgagctgaagggcatcgacttcaaggaggacggcaacatcctggggcacaagctggagtacaactacaacagccacaacgtctatatcatggccgacaagcagaagaacggcatcaaggtgaacttcaagatccgccacaacatcgaggacggcagcgtgcagctcgccgaccactaccagcagaacacccccatcggcgacggccccgtgctgctgcccgacaaccactacctgagcacccagtccgccctgagcaaagaccccaacgagaagcgcgatcacatggtcctgctggagttcgtgaccgccgccgggatcactctcggcatggacgagctgtacaagtaacctgcaggcgccggcggagcaggaggaccaaggccctggcgaaggccgtggcctcgttgagtctcagagatgcccggtgtgcaggtcccaatggccgggtattactgagattccacggggacgcgggcctggacgccggcatccgggctcaggacccccctcgagctcgctgatcagcctcgactgtgccttctagttgccagccatctgttgtttgcccctcccccgtgccttccttgaccctggaaggtgccactcccactgtcctttcctaataaaatgaggaaattgcatcgcattgtctgagtaggtgtcattctattctggggggtggggtggggcaggacagcaagggggaggattgggaagacaatagcaggcatgctggggatgcggtgggctctatggaagcttgaattcagctgacgtgcctcggaccgctaggaacccctagtgatggagttggccactccctctctgcgcgctcgctcgctcactgaggccgggcgaccaaaggtcgcccgacgcccgggctttgcccgggcggcctcagtgagcgagcgagcgcgcag

SEQ ID NO: 174 - DNA, 2982 bp, Artificial Sequence
  source: /note="Description of Artificial Sequence: Synthetic polynucleotide"
ctgcgcgctcgctcgctcactgaggccgcccgggcgtcgggcgacctttggtcgcccggcctcagtgagcgagcgagcgcgcagagagggagtggccaactccatcactaggggttcctgcggccgcacgcgtgacattgattattgactagttattaatagtaatcaattacggggtcattagttcatagcccatatatggagttccgcgttacataacttacggtaaatggcccgcctggctgaccgcccaacgacccccgcccattgacgtcaataatgacgtatgttcccatagtaacgccaatagggactttccattgacgtcaatgggtggactatttacggtaaactgcccacttggcagtacatcaagtgtatcatatgccaagtacgccccctattgacgtcaatgacggtaaatggcccgcctggcattatgcccagtacatgaccttatgggactttcctacttggcagtacatctacgtattagtcatcgctattaccatgggtcgaggtgagccccacgttctgcttcactctccccatctcccccccctccccacccccaattttgtatttatttattttttaattattttgtgcagcgatgggggcggggggggggggggcgcgcgccaggcggggcggggcggggcgaggggcggggcggggcgaggcggagaggtgcggcggcagccaatcagagcggcgcgctccgaaagtttccttttatggcgaggcggcggcggcggcggccctataaaaagcgaagcgcgcggcgggcgggagtcgctgcgttgccttcgccccgtgccccgctccgcgccgcctcgcgccgcccgccccggctctgactgaccgcgttactcccacaggtgagcgggcgggacggcccttctcctccgggctgtaattagcgcttggtttaatgacggctcgtttcttttctgtggctgcgtgaaagccttaaagggctccgggagggccctttgtgcgggggggagcggctcggggggtgcgtgcgtgtgtgtgtgcgtggggagcgccgcgtgcggcccgcgctgcccggcggctgtgagcgctgcgggcgcggcgcggggctttgtgcgctccgcgtgtgcgcgaggggagcgcggccgggggcggtgccccgcggtgcgggggggctgcgaggggaacaaaggctgcgtgcggggtgtgtgcgtgggggggtgagcagggggtgtgggcgcggcggtcgggctgtaacccccccctgcacccccctccccgagttgctgagcacggcccggcttcgggtgcggggctccgtgcggggcgtggcgcggggctcgccgtgccgggcggggggtggcggcaggtgggggtgccgggcggggcggggccgcctcgggccggggagggctcgggggaggggcgcggcggcccccggagcgccggcggtgtccccagagagcccgcaccagtgccatctgcttggccgatttgagtctcagagatgcccggcttgtgtctctccgctctgagctgtctgtctcgaggctcatatgggaaaagcaggacccgcagctgcgtccgcctcccctgcattctagagcctctgctaaccatgttcatgccttcttctttttcctacagctcctgggcaacgtgctggttattgtgaccggtcgctagccaccatggtgagcaagggcgaggagctgttcaccggggtggtgcccatcctggtcgagctggacggcgacgtaaacggccacaagttcagcgtgtccggcgagggcgagggcgatgccacctacggcaagctgaccctgaagttcatctgcaccaccggcaagctgcccgtgccctggcccaccctcgtgaccaccctgacctacggcgtgcagtgcttcagccgctaccccgaccacatgaagcagcacgacttcttcaagtccgccatgcccgaaggctacgtccaggagcgcaccatcttcttcaaggacgacggcaactacaagacccgcgccgaggtgaagttcgagggcgacaccctggtgaaccgcatcgagctgaagggcatcgacttcaaggaggacggcaacatcctggggcacaagctggagtacaactacaacagccacaacgtctatatcatggccgacaagcagaagaacggcatcaaggtgaacttcaagatccgccacaacatcgaggacggcagcgtgcagctcgccgaccactaccagcagaacacccccatcggcgacggccccgtgctgctgcccgacaaccactacctgagcacccagtccgccctgagcaaagaccccaacgagaagcgcgatcacatggtcctgctggagttcgtgaccgccgccgggatcactctcggcatggacgagctgtacaagtaacctgcaggcgccggcggtgtccccagagagcccgcaccagtgccatctgcttggccgatttgagtctcagagatgcccggcttgtgtctctccgctctgagctgtctgtctcgaggctcatatgggaaaagcaggacccgcagctgcgtccgcctcccctgcatgagctcgctgatcagcctcgactgtgccttctagttgccagccatctgttgtttgcccctcccccgtgccttccttgaccctggaaggtgccactcccactgtcctttcctaataaaatgaggaaattgcatcgcattgtctgagtaggtgtcattctattctggggggtggggtggggcaggacagcaagggggaggattgggaagacaatagcaggcatgctggggatgcggtgggctctatggaagcttgaattcagctgacgtgcctcggaccgctaggaacccctagtgatggagttggccactccctctctgcgcgctcgctcgctcactgaggccgggcgaccaaaggtcgcccgacgcccgggctttgcccgggcggcctcagtgagcgagcgagcgcgcag

SEQ ID NO: 175 - DNA, 2940 bp, Artificial Sequence
  source: /note="Description of Artificial Sequence: Synthetic polynucleotide"
ctgcgcgctcgctcgctcactgaggccgcccgggcgtcgggcgacctttggtcgcccggcctcagtgagcgagcgagcgcgcagagagggagtggccaactccatcactaggggttcctgcggccgcacgcgtgacattgattattgactagttattaatagtaatcaattacggggtcattagttcatagcccatatatggagttccgcgttacataacttacggtaaatggcccgcctggctgaccgcccaacgacccccgcccattgacgtcaataatgacgtatgttcccatagtaacgccaatagggactttccattgacgtcaatgggtggactatttacggtaaactgcccacttggcagtacatcaagtgtatcatatgccaagtacgccccctattgacgtcaatgacggtaaatggcccgcctggcattatgcccagtacatgaccttatgggactttcctacttggcagtacatctacgtattagtcatcgctattaccatgggtcgaggtgagccccacgttctgcttcactctccccatctcccccccctccccacccccaattttgtatttatttattttttaattattttgtgcagcgatgggggcggggggggggggggcgcgcgccaggcggggcggggcggggcgaggggcggggcggggcgaggcggagaggtgcggcggcagccaatcagagcggcgcgctccgaaagtttccttttatggcgaggcggcggcggcggcggccctataaaaagcgaagcgcgcggcgggcgggagtcgctgcgttgccttcgccccgtgccccgctccgcgccgcctcgcgccgcccgccccggctctgactgaccgcgttactcccacaggtgagcgggcgggacggcccttctcctccgggctgtaattagcgcttggtttaatgacggctcgtttcttttctgtggctgcgtgaaagccttaaagggctccgggagggccctttgtgcgggggggagcggctcggggggtgcgtgcgtgtgtgtgtgcgtggggagcgccgcgtgcggcccgcgctgcccggcggctgtgagcgctgcgggcgcggcgcggggctttgtgcgctccgcgtgtgcgcgaggggagcgcggccgggggcggtgccccgcggtgcgggggggctgcgaggggaacaaaggctgcgtgcggggtgtgtgcgtgggggggtgagcagggggtgtgggcgcggcggtcgggctgtaacccccccctgcacccccctccccgagttgctgagcacggcccggcttcgggtgcggggctccgtgcggggcgtggcgcggggctcgccgtgccgggcggggggtggcggcaggtgggggtgccgggcggggcggggccgcctcgggccggggagggctcgggggaggggcgcggcggcccccggagcgccggcgcatagctcttatgatagcaatgtcagcagtgcctttgagtctcagagatgcccgggttaagattctaaaattatcacgggtattacttgaggctcagaagtaaggttgaccatactctacagttgtgtctagagcctctgctaaccatgttcatgccttcttctttttcctacagctcctgggcaacgtgctggttattgtgaccggtcgctagccaccatggtgagcaagggcgaggagctgttcaccggggtggtgcccatcctggtcgagctggacggcgacgtaaacggccacaagttcagcgtgtccggcgagggcgagggcgatgccacctacggcaagctgaccctgaagttcatctgcaccaccggcaagctgcccgtgccctggcccaccctcgtgaccaccctgacctacggcgtgcagtgcttcagccgctaccccgaccacatgaagcagcacgacttcttcaagtccgccatgcccgaaggctacgtccaggagcgcaccatcttcttcaaggacgacggcaactacaagacccgcgccgaggtgaagttcgagggcgacaccctggtgaaccgcatcgagctgaagggcatcgacttcaaggaggacggcaacatcctggggcacaagctggagtacaactacaacagccacaacgtctatatcatggccgacaagcagaagaacggcatcaaggtgaacttcaagatccgccacaacatcgaggacggcagcgtgcagctcgccgaccactaccagcagaacacccccatcggcgacggccccgtgctgctgcccgacaaccactacctgagcacccagtccgccctgagcaaagaccccaacgagaagcgcgatcacatggtcctgctggagttcgtgaccgccgccgggatcactctcggcatggacgagctgtacaagtaacctgcaggcgccggcgcatagctcttatgatagcaatgtcagcagtgcctttctcgaagtgcttctgccgggttaagattctaaaattatcacggtagaaacatcttcgggagaagtaaggttgaccatactctacagttgtggagctcgctgatcagcctcgactgtgccttctagttgccagccatctgttgtttgcccctcccccgtgccttccttgaccctggaaggtgccactcccactgtcctttcctaataaaatgaggaaattgcatcgcattgtctgagtaggtgtcattctattctggggggtggggtggggcaggacagcaagggggaggattgggaagacaatagcaggcatgctggggatgcggtgggctctatggaagcttgaattcagctgacgtgcctcggaccgctaggaacccctagtgatggagttggccactccctctctgcgcgctcgctcgctcactgaggccgggcgaccaaaggtcgcccgacgcccgggctttgcccgggcggcctcagtgagcgagcgagcgcgcag

SEQ ID NO: 176 - DNA, 2978 bp, Artificial Sequence
  source: /note="Description of Artificial Sequence: Synthetic polynucleotide"
ctgcgcgctcgctcgctcactgaggccgcccgggcgtcgggcgacctttggtcgcccggcctcagtgagcgagcgagcgcgcagagagggagtggccaactccatcactaggggttcctgcggccgcacgcgtgacattgattattgactagttattaatagtaatcaattacggggtcattagttcatagcccatatatggagttccgcgttacataacttacggtaaatggcccgcctggctgaccgcccaacgacccccgcccattgacgtcaataatgacgtatgttcccatagtaacgccaatagggactttccattgacgtcaatgggtggactatttacggtaaactgcccacttggcagtacatcaagtgtatcatatgccaagtacgccccctattgacgtcaatgacggtaaatggcccgcctggcattatgcccagtacatgaccttatgggactttcctacttggcagtacatctacgtattagtcatcgctattaccatgggtcgaggtgagccccacgttctgcttcactctccccatctcccccccctccccacccccaattttgtatttatttattttttaattattttgtgcagcgatgggggcggggggggggggggcgcgcgccaggcggggcggggcggggcgaggggcggggcggggcgaggcggagaggtgcggcggcagccaatcagagcggcgcgctccgaaagtttccttttatggcgaggcggcggcggcggcggccctataaaaagcgaagcgcgcggcgggcgggagtcgctgcgttgccttcgccccgtgccccgctccgcgccgcctcgcgccgcccgccccggctctgactgaccgcgttactcccacaggtgagcgggcgggacggcccttctcctccgggctgtaattagcgcttggtttaatgacggctcgtttcttttctgtggctgcgtgaaagccttaaagggctccgggagggccctttgtgcgggggggagcggctcggggggtgcgtgcgtgtgtgtgtgcgtggggagcgccgcgtgcggcccgcgctgcccggcggctgtgagcgctgcgggcgcggcgcggggctttgtgcgctccgcgtgtgcgcgaggggagcgcggccgggggcggtgccccgcggtgcgggggggctgcgaggggaacaaaggctgcgtgcggggtgtgtgcgtgggggggtgagcagggggtgtgggcgcggcggtcgggctgtaacccccccctgcacccccctccccgagttgctgagcacggcccggcttcgggtgcggggctccgtgcggggcgtggcgcggggctcgccgtgccgggcggggggtggcggcaggtgggggtgccgggcggggcggggccgcctcgggccggggagggctcgggggaggggcgcggcggcccccggagcgccggcggagcaggaggaccaaggccctggcgaaggccgtggcctcgttgagtctcagagatgcccggtgtgcaggtcccaatggccgggtattactgagattccacggggacgcgggcctggacgccggcatccgggctcaggacccccctctctagagcctctgctaaccatgttcatgccttcttctttttcctacagctcctgggcaacgtgctggttattgtgaccggtcgctagccaccatggtgagcaagggcgaggagctgttcaccggggtggtgcccatcctggtcgagctggacggcgacgtaaacggccacaagttcagcgtgtccggcgagggcgagggcgatgccacctacggcaagctgaccctgaagttcatctgcaccaccggcaagctgcccgtgccctggcccaccctcgtgaccaccctgacctacggcgtgcagtgcttcagccgctaccccgaccacatgaagcagcacgacttcttcaagtccgccatgcccgaaggctacgtccaggagcgcaccatcttcttcaaggacgacggcaactacaagacccgcgccgaggtgaagttcgagggcgacaccctggtgaaccgcatcgagctgaagggcatcgacttcaaggaggacggcaacatcctggggcacaagctggagtacaactacaacagccacaacgtctatatcatggccgacaagcagaagaacggcatcaaggtgaacttcaagatccgccacaacatcgaggacggcagcgtgcagctcgccgaccactaccagcagaacacccccatcggcgacggccccgtgctgctgcccgacaaccactacctgagcacccagtccgccctgagcaaagaccccaacgagaagcgcgatcacatggtcctgctggagttcgtgaccgccgccgggatcactctcggcatggacgagctgtacaagtaacctgcaggcgccggcggagcaggaggaccaaggccctggcgaaggccgtggcctcgttctcgaagtgcttctgccggtgtgcaggtcccaatggccggtagaatcgtttcgagcacggggacgcgggcctggacgccggcatccgggctcaggacccccctcgagctcgctgatcagcctcgactgtgccttctagttgccagccatctgttgtttgcccctcccccgtgccttccttgaccctggaaggtgccactcccactgtcctttcctaataaaatgaggaaattgcatcgcattgtctgagtaggtgtcattctattctggggggtggggtggggcaggacagcaagggggaggattgggaagacaatagcaggcatgctggggatgcggtgggctctatggaagcttgaattcagctgacgtgcctcggaccgctaggaacccctagtgatggagttggccactccctctctgcgcgctcgctcgctcactgaggccgggcgaccaaaggtcgcccgacgcccgggctttgcccgggcggcctcagtgagcgagcgagcgcgcag

SEQ ID NO: 177 - DNA, 2982 bp, Artificial Sequence
  source: /note="Description of Artificial Sequence: Synthetic polynucleotide"
ctgcgcgctcgctcgctcactgaggccgcccgggcgtcgggcgacctttggtcgcccggcctcagtgagcgagcgagcgcgcagagagggagtggccaactccatcactaggggttcctgcggccgcacgcgtgacattgattattgactagttattaatagtaatcaattacggggtcattagttcatagcccatatatggagttccgcgttacataacttacggtaaatggcccgcctggctgaccgcccaacgacccccgcccattgacgtcaataatgacgtatgttcccatagtaacgccaatagggactttccattgacgtcaatgggtggactatttacggtaaactgcccacttggcagtacatcaagtgtatcatatgccaagtacgccccctattgacgtcaatgacggtaaatggcccgcctggcattatgcccagtacatgaccttatgggactttcctacttggcagtacatctacgtattagtcatcgctattaccatgggtcgaggtgagccccacgttctgcttcactctccccatctcccccccctccccacccccaattttgtatttatttattttttaattattttgtgcagcgatgggggcggggggggggggggcgcgcgccaggcggggcggggcggggcgaggggcggggcggggcgaggcggagaggtgcggcggcagccaatcagagcggcgcgctccgaaagtttccttttatggcgaggcggcggcggcggcggccctataaaaagcgaagcgcgcggcgggcgggagtcgctgcgttgccttcgccccgtgccccgctccgcgccgcctcgcgccgcccgccccggctctgactgaccgcgttactcccacaggtgagcgggcgggacggcccttctcctccgggctgtaattagcgcttggtttaatgacggctcgtttcttttctgtggctgcgtgaaagccttaaagggctccgggagggccctttgtgcgggggggagcggctcggggggtgcgtgcgtgtgtgtgtgcgtggggagcgccgcgtgcggcccgcgctgcccggcggctgtgagcgctgcgggcgcggcgcggggctttgtgcgctccgcgtgtgcgcgaggggagcgcggccgggggcggtgccccgcggtgcgggggggctgcgaggggaacaaaggctgcgtgcggggtgtgtgcgtgggggggtgagcagggggtgtgggcgcggcggtcgggctgtaacccccccctgcacccccctccccgagttgctgagcacggcccggcttcgggtgcggggctccgtgcggggcgtggcgcggggctcgccgtgccgggcggggggtggcggcaggtgggggtgccgggcggggcggggccgcctcgggccggggagggctcgggggaggggcgcggcggcccccggagcgccggcggtgtccccagagagcccgcaccagtgccatctgcttggccgatttgagtctcagagatgcccggcttgtgtctctccgctctgagctgtctgtctcgaggctcatatgggaaaagcaggacccgcagctgcgtccgcctcccctgcattctagagcctctgctaaccatgttcatgccttcttctttttcctacagctcctgggcaacgtgctggttattgtgaccggtcgctagccaccatggtgagcaagggcgaggagctgttcaccggggtggtgcccatcctggtcgagctggacggcgacgtaaacggccacaagttcagcgtgtccggcgagggcgagggcgatgccacctacggcaagctgaccctgaagttcatctgcaccaccggcaagctgcccgtgccctggcccaccctcgtgaccaccctgacctacggcgtgcagtgcttcagccgctaccccgaccacatgaagcagcacgacttcttcaagtccgccatgcccgaaggctacgtccaggagcgcaccatcttcttcaaggacgacggcaactacaagacccgcgccgaggtgaagttcgagggcgacaccctggtgaaccgcatcgagctgaagggcatcgacttcaaggaggacggcaacatcctggggcacaagctggagtacaactacaacagccacaacgtctatatcatggccgacaagcagaagaacggcatcaaggtgaacttcaagatccgccacaacatcgaggacggcagcgtgcagctcgccgaccactaccagcagaacacccccatcggcgacggccccgtgctgctgcccgacaaccactacctgagcacccagtccgccctgagcaaagaccccaacgagaagcgcgatcacatggtcctgctggagttcgtgaccgccgccgggatcactctcggcatggacgagctgtacaagtaacctgcaggcgccggcggtgtccccagagagcccgcaccagtgccatctgcttggccgatttctcgaagtgcttctgccggcttgtgtctctccgctctgagctgtgaggagctttcgggatatgggaaaagcaggacccgcagctgcgtccgcctcccctgcatgagctcgctgatcagcctcgactgtgccttctagttgccagccatctgttgtttgcccctcccccgtgccttccttgaccctggaaggtgccactcccactgtcctttcctaataaaatgaggaaattgcatcgcattgtctgagtaggtgtcattctattctggggggtggggtggggcaggacagcaagggggaggattgggaagacaatagcaggcatgctggggatgcggtgggctctatggaagcttgaattcagctgacgtgcctcggaccgctaggaacccctagtgatggagttggccactccctctctgcgcgctcgctcgctcactgaggccgggcgaccaaaggtcgcccgacgcccgggctttgcccgggcggcctcagtgagcgagcgagcgcgcag

SEQ ID NO: 178 - DNA, 2940 bp, Artificial Sequence
  source: /note="Description of Artificial Sequence: Synthetic polynucleotide"
ctgcgcgctcgctcgctcactgaggccgcccgggcgtcgggcgacctttggtcgcccggcctcagtgagcgagcgagcgcgcagagagggagtggccaactccatcactaggggttcctgcggccgcacgcgtgacattgattattgactagttattaatagtaatcaattacggggtcattagttcatagcccatatatggagttccgcgttacataacttacggtaaatggcccgcctggctgaccgcccaacgacccccgcccattgacgtcaataatgacgtatgttcccatagtaacgccaatagggactttccattgacgtcaatgggtggactatttacggtaaactgcccacttggcagtacatcaagtgtatcatatgccaagtacgccccctattgacgtcaatgacggtaaatggcccgcctggcattatgcccagtacatgaccttatgggactttcctacttggcagtacatctacgtattagtcatcgctattaccatgggtcgaggtgagccccacgttctgcttcactctccccatctcccccccctccccacccccaattttgtatttatttattttttaattattttgtgcagcgatgggggcggggggggggggggcgcgcgccaggcggggcggggcggggcgaggggcggggcggggcgaggcggagaggtgcggcggcagccaatcagagcggcgcgctccgaaagtttccttttatggcgaggcggcggcggcggcggccctataaaaagcgaagcgcgcggcgggcgggagtcgctgcgttgccttcgccccgtgccccgctccgcgccgcctcgcgccgcccgccccggctctgactgaccgcgttactcccacaggtgagcgggcgggacggcccttctcctccgggctgtaattagcgcttggtttaatgacggctcgtttcttttctgtggctgcgtgaaagccttaaagggctccgggagggccctttgtgcgggggggagcggctcggggggtgcgtgcgtgtgtgtgtgcgtggggagcgccgcgtgcggcccgcgctgcccggcggctgtgagcgctgcgggcgcggcgcggggctttgtgcgctccgcgtgtgcgcgaggggagcgcggccgggggcggtgccccgcggtgcgggggggctgcgaggggaacaaaggctgcgtgcggggtgtgtgcgtgggggggtgagcagggggtgtgggcgcggcggtcgggctgtaacccccccctgcacccccctccccgagttgctgagcacggcccggcttcgggtgcggggctccgtgcggggcgtggcgcggggctcgccgtgccgggcggggggtggcggcaggtgggggtgccgggcggggcggggccgcctcgggccggggagggctcgggggaggggcgcggcggcccccggagcgccggcgcatagctcttatgatagcaatgtcagcagtgcctttgagtctcagagatgcccgggttaagattctaaaattatcacgggtattacttgaggctcagaagtaaggttgaccatactctacagttgtgtctagagcctctgctaaccatgttcatgccttcttctttttcctacagctcctgggcaacgtgctggttattgtgaccggtcgctagccaccatggtgagcaagggcgaggagctgttcaccggggtggtgcccatcctggtcgagctggacggcgacgtaaacggccacaagttcagcgtgtccggcgagggcgagggcgatgccacctacggcaagctgaccctgaagttcatctgcaccaccggcaagctgcccgtgccctggcccaccctcgtgaccaccctgacctacggcgtgcagtgcttcagccgctaccccgaccacatgaagcagcacgacttcttcaagtccgccatgcccgaaggctacgtccaggagcgcaccatcttcttcaaggacgacggcaactacaagacccgcgccgaggtgaagttcgagggcgacaccctggtgaaccgcatcgagctgaagggcatcgacttcaaggaggacggcaacatcctggggcacaagctggagtacaactacaacagccacaacgtctatatcatggccgacaagcagaagaacggcatcaaggtgaacttcaagatccgccacaacatcgaggacggcagcgtgcagctcgccgaccactaccagcagaacacccccatcggcgacggccccgtgctgctgcccgacaaccactacctgagcacccagtccgccctgagcaaagaccccaacgagaagcgcgatcacatggtcctgctggagttcgtgaccgccgccgggatcactctcggcatggacgagctgtacaagtaacctgcaggcgccggcgcatagctcttatgatagcaatgtcagcagtgcctttctccaccttgaccacgcgtgttaagattctaaaattatctcgtgtggtaagtggtggagagaagtaaggttgaccatactctacagttgtggagctcgctgatcagcctcgactgtgccttctagttgccagccatctgttgtttgcccctcccccgtgccttccttgaccctggaaggtgccactcccactgtcctttcctaataaaatgaggaaattgcatcgcattgtctgagtaggtgtcattctattctggggggtggggtggggcaggacagcaagggggaggattgggaagacaatagcaggcatgctggggatgcggtgggctctatggaagcttgaattcagctgacgtgcctcggaccgctaggaacccctagtgatggagttggccactccctctctgcgcgctcgctcgctcactgaggccgggcgaccaaaggtcgcccgacgcccgggctttgcccgggcggcctcagtgagcgagcgagcgcgcag

SEQ ID NO: 179 - DNA, 2978 bp, Artificial Sequence
  source: /note="Description of Artificial Sequence: Synthetic polynucleotide"
ctgcgcgctcgctcgctcactgaggccgcccgggcgtcgggcgacctttggtcgcccggcctcagtgagcgagcgagcgcgcagagagggagtggccaactccatcactaggggttcctgcggccgcacgcgtgacattgattattgactagttattaatagtaatcaattacggggtcattagttcatagcccatatatggagttccgcgttacataacttacggtaaatggcccgcctggctgaccgcccaacgacccccgcccattgacgtcaataatgacgtatgttcccatagtaacgccaatagggactttccattgacgtcaatgggtggactatttacggtaaactgcccacttggcagtacatcaagtgtatcatatgccaagtacgccccctattgacgtcaatgacggtaaatggcccgcctggcattatgcccagtacatgaccttatgggactttcctacttggcagtacatctacgtattagtcatcgctattaccatgggtcgaggtgagccccacgttctgcttcactctccccatctcccccccctccccacccccaattttgtatttatttattttttaattattttgtgcagcgatgggggcggggggggggggggcgcgcgccaggcggggcggggcggggcgaggggcggggcggggcgaggcggagaggtgcggcggcagccaatcagagcggcgcgctccgaaagtttccttttatggcgaggcggcggcggcggcggccctataaaaagcgaagcgcgcggcgggcgggagtcgctgcgttgccttcgccccgtgccccgctccgcgccgcctcgcgccgcccgccccggctctgactgaccgcgttactcccacaggtgagcgggcgggacggcccttctcctccgggctgtaattagcgcttggtttaatgacggctcgtttcttttctgtggctgcgtgaaagccttaaagggctccgggagggccctttgtgcgggggggagcggctcggggggtgcgtgcgtgtgtgtgtgcgtggggagcgccgcgtgcggcccgcgctgcccggcggctgtgagcgctgcgggcgcggcgcggggctttgtgcgctccgcgtgtgcgcgaggggagcgcggccgggggcggtgccccgcggtgcgggggggctgcgaggggaacaaaggctgcgtgcggggtgtgtgcgtgggggggtgagcagggggtgtgggcgcggcggtcgggctgtaacccccccctgcacccccctccccgagttgctgagcacggcccggcttcgggtgcggggctccgtgcggggcgtggcgcggggctcgccgtgccgggcggggggtggcggcaggtgggggtgccgggcggggcggggccgcctcgggccggggagggctcgggggaggggcgcggcggcccccggagcgccggcggagcaggaggaccaaggccctggcgaaggccgtggcctcgttgagtctcagagatgcccggtgtgcaggtcccaatggccgggtattactgagattccacggggacgcgggcctggacgccggcatccgggctcaggacccccctctctagagcctctgctaaccatgttcatgccttcttctttttcctacagctcctgggcaacgtgctggttattgtgaccggtcgctagccaccatggtgagcaagggcgaggagctgttcaccggggtggtgcccatcctggtcgagctggacggcgacgtaaacggccacaagttcagcgtgtccggcgagggcgagggcgatgccacctacggcaagctgaccctgaagttcatctgcaccaccggcaagctgcccgtgccctggcccaccctcgtgaccaccctgacctacggcgtgcagtgcttcagccgctaccccgaccacatgaagcagcacgacttcttcaagtccgccatgcccgaaggctacgtccaggagcgcaccatcttcttcaaggacgacggcaactacaagacccgcgccgaggtgaagttcgagggcgacaccctggtgaaccgcatcgagctgaagggcatcgacttcaaggaggacggcaacatcctggggcacaagctggagtacaactacaacagccacaacgtctatatcatggccgacaagcagaagaacggcatcaaggtgaacttcaagatccgccacaacatcgaggacggcagcgtgcagctcgccgaccactaccagcagaacacccccatcggcgacggccccgtgctgctgcccgacaaccactacctgagcacccagtccgccctgagcaaagaccccaacgagaagcgcgatcacatggtcctgctggagttcgtgaccgccgccgggatcactctcggcatggacgagctgtacaagtaacctgcaggcgccggcggagcaggaggaccaaggccctggcgaaggccgtggcctcgttctccaccttgaccacgcgttgtgcaggtcccaatgggcgtgtggtagaggtggagcacggggacgcgggcctggacgccggcatccgggctcaggacccccctcgagctcgctgatcagcctcgactgtgccttctagttgccagccatctgttgtttgcccctcccccgtgccttccttgaccctggaaggtgccactcccactgtcctttcctaataaaatgaggaaattgcatcgcattgtctgagtaggtgtcattctattctggggggtggggtggggcaggacagcaagggggaggattgggaagacaatagcaggcatgctggggatgcggtgggctctatggaagcttgaattcagctgacgtgcctcggaccgctaggaacccctagtgatggagttggccactccctctctgcgcgctcgctcgctcactgaggccgggcgaccaaaggtcgcccgacgcccgggctttgcccgggcggcctcagtgagcgagcgagcgcgcag

SEQ ID NO: 180 - DNA, 2982 bp, Artificial Sequence
  source: /note="Description of Artificial Sequence: Synthetic polynucleotide"
ctgcgcgctcgctcgctcactgaggccgcccgggcgtcgggcgacctttggtcgcccggcctcagtgagcgagcgagcgcgcagagagggagtggccaactccatcactaggggttcctgcggccgcacgcgtgacattgattattgactagttattaatagtaatcaattacggggtcattagttcatagcccatatatggagttccgcgttacataacttacggtaaatggcccgcctggctgaccgcccaacgacccccgcccattgacgtcaataatgacgtatgttcccatagtaacgccaatagggactttccattgacgtcaatgggtggactatttacggtaaactgcccacttggcagtacatcaagtgtatcatatgccaagtacgccccctattgacgtcaatgacggtaaatggcccgcctggcattatgcccagtacatgaccttatgggactttcctacttggcagtacatctacgtattagtcatcgctattaccatgggtcgaggtgagccccacgttctgcttcactctccccatctcccccccctccccacccccaattttgtatttatttattttttaattattttgtgcagcgatgggggcggggggggggggggcgcgcgccaggcggggcggggcggggcgaggggcggggcggggcgaggcggagaggtgcggcggcagccaatcagagcggcgcgctccgaaagtttccttttatggcgaggcggcggcggcggcggccctataaaaagcgaagcgcgcggcgggcgggagtcgctgcgttgccttcgccccgtgccccgctccgcgccgcctcgcgccgcccgccccggctctgactgaccgcgttactcccacaggtgagcgggcgggacggcccttctcctccgggctgtaattagcgcttggtttaatgacggctcgtttcttttctgtggctgcgtgaaagccttaaagggctccgggagggccctttgtgcgggggggagcggctcggggggtgcgtgcgtgtgtgtgtgcgtggggagcgccgcgtgcggcccgcgctgcccggcggctgtgagcgctgcgggcgcggcgcggggctttgtgcgctccgcgtgtgcgcgaggggagcgcggccgggggcggtgccccgcggtgcgggggggctgcgaggggaacaaaggctgcgtgcggggtgtgtgcgtgggggggtgagcagggggtgtgggcgcggcggtcgggctgtaacccccccctgcacccccctccccgagttgctgagcacggcccggcttcgggtgcggggctccgtgcggggcgtggcgcggggctcgccgtgccgggcggggggtggcggcaggtgggggtgccgggcggggcggggccgcctcgggccggggagggctcgggggaggggcgcggcggcccccggagcgccggcggtgtccccagagagcccgcaccagtgccatctgcttggccgatttgagtctcagagatgcccggcttgtgtctctccgctctgagctgtctgtctcgaggctcatatgggaaaagcaggacccgcagctgcgtccgcctcccctgcattctagagcctctgctaaccatgttcatgccttcttctttttcctacagctcctgggcaacgtgctggttattgtgaccggtcgctagccaccatggtgagcaagggcgaggagctgttcaccggggtggtgcccatcctggtcgagctggacggcgacgtaaacggccacaagttcagcgtgtccggcgagggcgagggcgatgccacctacggcaagctgaccctgaagttcatctgcaccaccggcaagctgcccgtgccctggcccaccctcgtgaccaccctgacctacggcgtgcagtgcttcagccgctaccccgaccacatgaagcagcacgacttcttcaagtccgccatgcccgaaggctacgtccaggagcgcaccatcttcttcaaggacgacggcaactacaagacccgcgccgaggtgaagttcgagggcgacaccctggtgaaccgcatcgagctgaagggcatcgacttcaaggaggacggcaacatcctggggcacaagctggagtacaactacaacagccacaacgtctatatcatggccgacaagcagaagaacggcatcaaggtgaacttcaagatccgccacaacatcgaggacggcagcgtgcagctcgccgaccactaccagcagaacacccccatcggcgacggccccgtgctgctgcccgacaaccactacctgagcacccagtccgccctgagcaaagaccccaacgagaagcgcgatcacatggtcctgctggagttcgtgaccgccgccgggatcactctcggcatggacgagctgtacaagtaacctgcaggcgccggcggtgtccccagagagcccgcaccagtgccatctgcttggccgatttctccaccttgaccacgcgtcttgtgtctctccgctctgaggtgactggttgggtggagatatgggaaaagcaggacccgcagctgcgtccgcctcccctgcatgagctcgctgatcagcctcgactgtgccttctagttgccagccatctgttgtttgcccctcccccgtgccttccttgaccctggaaggtgccactcccactgtcctttcctaataaaatgaggaaattgcatcgcattgtctgagtaggtgtcattctattctggggggtggggtggggcaggacagcaagggggaggattgggaagacaatagcaggcatgctggggatgcggtgggctctatggaagcttgaattcagctgacgtgcctcggaccgctaggaacccctagtgatggagttggccactccctctctgcgcgctcgctcgctcactgaggccgggcgaccaaaggtcgcccgacgcccgggctttgcccgggcggcctcagtgagcgagcgagcgcgcag

SEQ ID NO: 181 - DNA, 2940 bp, Artificial Sequence
  source: /note="Description of Artificial Sequence: Synthetic polynucleotide"
ctgcgcgctcgctcgctcactgaggccgcccgggcgtcgggcgacctttggtcgcccggcctcagtgagcgagcgagcgcgcagagagggagtggccaactccatcactaggggttcctgcggccgcacgcgtgacattgattattgactagttattaatagtaatcaattacggggtcattagttcatagcccatatatggagttccgcgttacataacttacggtaaatggcccgcctggctgaccgcccaacgacccccgcccattgacgtcaataatgacgtatgttcccatagtaacgccaatagggactttccattgacgtcaatgggtggactatttacggtaaactgcccacttggcagtacatcaagtgtatcatatgccaagtacgccccctattgacgtcaatgacggtaaatggcccgcctggcattatgcccagtacatgaccttatgggactttcctacttggcagtacatctacgtattagtcatcgctattaccatgggtcgaggtgagccccacgttctgcttcactctccccatctcccccccctccccacccccaattttgtatttatttattttttaattattttgtgcagcgatgggggcggggggggggggggcgcgcgccaggcggggcggggcggggcgaggggcggggcggggcgaggcggagaggtgcggcggcagccaatcagagcggcgcgctccgaaagtttccttttatggcgaggcggcggcggcggcggccctataaaaagcgaagcgcgcggcgggcgggagtcgctgcgttgccttcgccccgtgccccgctccgcgccgcctcgcgccgcccgccccggctctgactgaccgcgttactcccacaggtgagcgggcgggacggcccttctcctccgggctgtaattagcgcttggtttaatgacggctcgtttcttttctgtggctgcgtgaaagccttaaagggctccgggagggccctttgtgcgggggggagcggctcggggggtgcgtgcgtgtgtgtgtgcgtggggagcgccgcgtgcggcccgcgctgcccggcggctgtgagcgctgcgggcgcggcgcggggctttgtgcgctccgcgtgtgcgcgaggggagcgcggccgggggcggtgccccgcggtgcgggggggctgcgaggggaacaaaggctgcgtgcggggtgtgtgcgtgggggggtgagcagggggtgtgggcgcggcggtcgggctgtaacccccccctgcacccccctccccgagttgctgagcacggcccggcttcgggtgcggggctccgtgcggggcgtggcgcggggctcgccgtgccgggcggggggtggcggcaggtgggggtgccgggcggggcggggccgcctcgggccggggagggctcgggggaggggcgcggcggcccccggagcgccggcgcatagctcttatgatagcaatgtcagcagtgcctttgagtctcagagatgcccgggttaagattctaaaattatcacgggtattacttgaggctcagaagtaaggttgaccatactctacagttgtgtctagagcctctgctaaccatgttcatgccttcttctttttcctacagctcctgggcaacgtgctggttattgtgaccggtcgctagccaccatggtgagcaagggcgaggagctgttcaccggggtggtgcccatcctggtcgagctggacggcgacgtaaacggccacaagttcagcgtgtccggcgagggcgagggcgatgccacctacggcaagctgaccctgaagttcatctgcaccaccggcaagctgcccgtgccctggcccaccctcgtgaccaccctgacctacggcgtgcagtgcttcagccgctaccccgaccacatgaagcagcacgacttcttcaagtccgccatgcccgaaggctacgtccaggagcgcaccatcttcttcaaggacgacggcaactacaagacccgcgccgaggtgaagttcgagggcgacaccctggtgaaccgcatcgagctgaagggcatcgacttcaaggaggacggcaacatcctggggcacaagctggagtacaactacaacagccacaacgtctatatcatggccgacaagcagaagaacggcatcaaggtgaacttcaagatccgccacaacatcgaggacggcagcgtgcagctcgccgaccactaccagcagaacacccccatcggcgacggccccgtgctgctgcccgacaaccactacctgagcacccagtccgccctgagcaaagaccccaacgagaagcgcgatcacatggtcctgctggagttcgtgaccgccgccgggatcactctcggcatggacgagctgtacaagtaacctgcaggcgccggcgcatagctcttatgatagcaatgtcagcagtgcctatactgtcatagtagtaccaggttaagattctaaaattatcatggtactaatgttggcagtgtaagtaaggttgaccatactctacagttgtggagctcgctgatcagcctcgactgtgccttctagttgccagccatctgttgtttgcccctcccccgtgccttccttgaccctggaaggtgccactcccactgtcctttcctaataaaatgaggaaattgcatcgcattgtctgagtaggtgtcattctattctggggggtggggtggggcaggacagcaagggggaggattgggaagacaatagcaggcatgctggggatgcggtgggctctatggaagcttgaattcagctgacgtgcctcggaccgctaggaacccctagtgatggagttggccactccctctctgcgcgctcgctcgctcactgaggccgggcgaccaaaggtcgcccgacgcccgggctttgcccgggcggcctcagtgagcgagcgagcgcgcag

SEQ ID NO: 182 - DNA, 2978 bp, Artificial Sequence
  source: /note="Description of Artificial Sequence: Synthetic polynucleotide"
ctgcgcgctcgctcgctcactgaggccgcccgggcgtcgggcgacctttggtcgcccggcctcagtgagcgagcgagcgcgcagagagggagtggccaactccatcactaggggttcctgcggccgcacgcgtgacattgattattgactagttattaatagtaatcaattacggggtcattagttcatagcccatatatggagttccgcgttacataacttacggtaaatggcccgcctggctgaccgcccaacgacccccgcccattgacgtcaataatgacgtatgttcccatagtaacgccaatagggactttccattgacgtcaatgggtggactatttacggtaaactgcccacttggcagtacatcaagtgtatcatatgccaagtacgccccctattgacgtcaatgacggtaaatggcccgcctggcattatgcccagtacatgaccttatgggactttcctacttggcagtacatctacgtattagtcatcgctattaccatgggtcgaggtgagccccacgttctgcttcactctccccatctcccccccctccccacccccaattttgtatttatttattttttaattattttgtgcagcgatgggggcggggggggggggggcgcgcgccaggcggggcggggcggggcgaggggcggggcggggcgaggcggagaggtgcggcggcagccaatcagagcggcgcgctccgaaagtttccttttatggcgaggcggcggcggcggcggccctataaaaagcgaagcgcgcggcgggcgggagtcgctgcgttgccttcgccccgtgccccgctccgcgccgcctcgcgccgcccgccccggctctgactgaccgcgttactcccacaggtgagcgggcgggacggcccttctcctccgggctgtaattagcgcttggtttaatgacggctcgtttcttttctgtggctgcgtgaaagccttaaagggctccgggagggccctttgtgcgggggggagcggctcggggggtgcgtgcgtgtgtgtgtgcgtggggagcgccgcgtgcggcccgcgctgcccggcggctgtgagcgctgcgggcgcggcgcggggctttgtgcgctccgcgtgtgcgcgaggggagcgcggccgggggcggtgccccgcggtgcgggggggctgcgaggggaacaaaggctgcgtgcggggtgtgtgcgtgggggggtgagcagggggtgtgggcgcggcggtcgggctgtaacccccccctgcacccccctccccgagttgctgagcacggcccggcttcgggtgcggggctccgtgcggggcgtggcgcggggctcgccgtgccgggcggggggtggcggcaggtgggggtgccgggcggggcggggccgcctcgggccggggagggctcgggggaggggcgcggcggcccccggagcgccggcggagcaggaggaccaaggccctggcgaaggccgtggcctcgttgagtctcagagatgcccggtgtgcaggtcccaatggccgggtattactgagattccacggggacgcgggcctggacgccggcatccgggctcaggacccccctctctagagcctctgctaaccatgttcatgccttcttctttttcctacagctcctgggcaacgtgctggttattgtgaccggtcgctagccaccatggtgagcaagggcgaggagctgttcaccggggtggtgcccatcctggtcgagctggacggcgacgtaaacggccacaagttcagcgtgtccggcgagggcgagggcgatgccacctacggcaagctgaccctgaagttcatctgcaccaccggcaagctgcccgtgccctggcccaccctcgtgaccaccctgacctacggcgtgcagtgcttcagccgctaccccgaccacatgaagcagcacgacttcttcaagtccgccatgcccgaaggctacgtccaggagcgcaccatcttcttcaaggacgacggcaactacaagacccgcgccgaggtgaagttcgagggcgacaccctggtgaaccgcatcgagctgaagggcatcgacttcaaggaggacggcaacatcctggggcacaagctggagtacaactacaacagccacaacgtctatatcatggccgacaagcagaagaacggcatcaaggtgaacttcaagatccgccacaacatcgaggacggcagcgtgcagctcgccgaccactaccagcagaacacccccatcggcgacggccccgtgctgctgcccgacaaccactacctgagcacccagtccgccctgagcaaagaccccaacgagaagcgcgatcacatggtcctgctggagttcgtgaccgccgccgggatcactctcggcatggacgagctgtacaagtaacctgcaggcgccggcggagcaggaggaccaaggccctggcgaaggccgtggcctcgatactgtcatagtagtaccagtgtgcaggtcccaatggctggtactaatgtgacagtctcggggacgcgggcctggacgccggcatccgggctcaggacccccctcgagctcgctgatcagcctcgactgtgccttctagttgccagccatctgttgtttgcccctcccccgtgccttccttgaccctggaaggtgccactcccactgtcctttcctaataaaatgaggaaattgcatcgcattgtctgagtaggtgtcattctattctggggggtggggtggggcaggacagcaagggggaggattgggaagacaatagcaggcatgctggggatgcggtgggctctatggaagcttgaattcagctgacgtgcctcggaccgctaggaacccctagtgatggagttggccactccctctctgcgcgctcgctcgctcactgaggccgggcgaccaaaggtcgcccgacgcccgggctttgcccgggcggcctcagtgagcgagcgagcgcgcag

SEQ ID NO: 183 - DNA, 2982 bp, Artificial Sequence
  source: /note="Description of Artificial Sequence: Synthetic polynucleotide"
ctgcgcgctcgctcgctcactgaggccgcccgggcgtcgggcgacctttggtcgcccggcctcagtgagcgagcgagcgcgcagagagggagtggccaactccatcactaggggttcctgcggccgcacgcgtgacattgattattgactagttattaatagtaatcaattacggggtcattagttcatagcccatatatggagttccgcgttacataacttacggtaaatggcccgcctggctgaccgcccaacgacccccgcccattgacgtcaataatgacgtatgttcccatagtaacgccaatagggactttccattgacgtcaatgggtggactatttacggtaaactgcccacttggcagtacatcaagtgtatcatatgccaagtacgccccctattgacgtcaatgacggtaaatggcccgcctggcattatgcccagtacatgaccttatgggactttcctacttggcagtacatctacgtattagtcatcgctattaccatgggtcgaggtgagccccacgttctgcttcactctccccatctcccccccctccccacccccaattttgtatttatttattttttaattattttgtgcagcgatgggggcggggggggggggggcgcgcgccaggcggggcggggcggggcgaggggcggggcggggcgaggcggagaggtgcggcggcagccaatcagagcggcgcgctccgaaagtttccttttatggcgaggcggcggcggcggcggccctataaaaagcgaagcgcgcggcgggcgggagtcgctgcgttgccttcgccccgtgccccgctccgcgccgcctcgcgccgcccgccccggctctgactgaccgcgttactcccacaggtgagcgggcgggacggcccttctcctccgggctgtaattagcgcttggtttaatgacggctcgtttcttttctgtggctgcgtgaaagccttaaagggctccgggagggccctttgtgcgggggggagcggctcggggggtgcgtgcgtgtgtgtgtgcgtggggagcgccgcgtgcggcccgcgctgcccggcggctgtgagcgctgcgggcgcggcgcggggctttgtgcgctccgcgtgtgcgcgaggggagcgcggccgggggcggtgccccgcggtgcgggggggctgcgaggggaacaaaggctgcgtgcggggtgtgtgcgtgggggggtgagcagggggtgtgggcgcggcggtcgggctgtaacccccccctgcacccccctccccgagttgctgagcacggcccggcttcgggtgcggggctccgtgcggggcgtggcgcggggctcgccgtgccgggcggggggtggcggcaggtgggggtgccgggcggggcggggccgcctcgggccggggagggctcgggggaggggcgcggcggcccccggagcgccggcggtgtccccagagagcccgcaccagtgccatctgcttggccgatttgagtctcagagatgcccggcttgtgtctctccgctctgagctgtctgtctcgaggctcatatgggaaaagcaggacccgcagctgcgtccgcctcccctgcattctagagcctctgctaaccatgttcatgccttcttctttttcctacagctcctgggcaacgtgctggttattgtgaccggtcgctagccaccatggtgagcaagggcgaggagctgttcaccggggtggtgcccatcctggtcgagctggacggcgacgtaaacggccacaagttcagcgtgtccggcgagggcgagggcgatgccacctacggcaagctgaccctgaagttcatctgcaccaccggcaagctgcccgtgccctggcccaccctcgtgaccaccctgacctacggcgtgcagtgcttcagccgctaccccgaccacatgaagcagcacgacttcttcaagtccgccatgcccgaaggctacgtccaggagcgcaccatcttcttcaaggacgacggcaactacaagacccgcgccgaggtgaagttcgagggcgacaccctggtgaaccgcatcgagctgaagggcatcgacttcaaggaggacggcaacatcctggggcacaagctggagtacaactacaacagccacaacgtctatatcatggccgacaagcagaagaacggcatcaaggtgaacttcaagatccgccacaacatcgaggacggcagcgtgcagctcgccgaccactaccagcagaacacccccatcggcgacggccccgtgctgctgcccgacaaccactacctgagcacccagtccgccctgagcaaagaccccaacgagaagcgcgatcacatggtcctgctggagttcgtgaccgccgccgggatcactctcggcatggacgagctgtacaagtaacctgcaggcgccggcggtgtccccagagagcccgcaccagtgccatctgcttggccgatatactgtcatagtagtaccagcttgtgtctctccgctctgagctgtcactgcttgacggtaaatgggaaaagcaggacccgcagctgcgtccgcctcccctgcatgagctcgctgatcagcctcgactgtgccttctagttgccagccatctgttgtttgcccctcccccgtgccttccttgaccctggaaggtgccactcccactgtcctttcctaataaaatgaggaaattgcatcgcattgtctgagtaggtgtcattctattctggggggtggggtggggcaggacagcaagggggaggattgggaagacaatagcaggcatgctggggatgcggtgggctctatggaagcttgaattcagctgacgtgcctcggaccgctaggaacccctagtgatggagttggccactccctctctgcgcgctcgctcgctcactgaggccgggcgaccaaaggtcgcccgacgcccgggctttgcccgggcggcctcagtgagcgagcgagcgcgcag

SEQ ID NO: 184 - DNA, 2940 bp, Artificial Sequence
  source: /note="Description of Artificial Sequence: Synthetic polynucleotide"
ctgcgcgctcgctcgctcactgaggccgcccgggcgtcgggcgacctttggtcgcccggcctcagtgagcgagcgagcgcgcagagagggagtggccaactccatcactaggggttcctgcggccgcacgcgtgacattgattattgactagttattaatagtaatcaattacggggtcattagttcatagcccatatatggagttccgcgttacataacttacggtaaatggcccgcctggctgaccgcccaacgacccccgcccattgacgtcaataatgacgtatgttcccatagtaacgccaatagggactttccattgacgtcaatgggtggactatttacggtaaactgcccacttggcagtacatcaagtgtatcatatgccaagtacgccccctattgacgtcaatgacggtaaatggcccgcctggcattatgcccagtacatgaccttatgggactttcctacttggcagtacatctacgtattagtcatcgctattaccatgggtcgaggtgagccccacgttctgcttcactctccccatctcccccccctccccacccccaattttgtatttatttattttttaattattttgtgcagcgatgggggcggggggggggggggcgcgcgccaggcggggcggggcggggcgaggggcggggcggggcgaggcggagaggtgcggcggcagccaatcagagcggcgcgctccgaaagtttccttttatggcgaggcggcggcggcggcggccctataaaaagcgaagcgcgcggcgggcgggagtcgctgcgttgccttcgccccgtgccccgctccgcgccgcctcgcgccgcccgccccggctctgactgaccgcgttactcccacaggtgagcgggcgggacggcccttctcctccgggctgtaattagcgcttggtttaatgacggctcgtttcttttctgtggctgcgtgaaagccttaaagggctccgggagggccctttgtgcgggggggagcggctcggggggtgcgtgcgtgtgtgtgtgcgtggggagcgccgcgtgcggcccgcgctgcccggcggctgtgagcgctgcgggcgcggcgcggggctttgtgcgctccgcgtgtgcgcgaggggagcgcggccgggggcggtgccccgcggtgcgggggggctgcgaggggaacaaaggctgcgtgcggggtgtgtgcgtgggggggtgagcagggggtgtgggcgcggcggtcgggctgtaacccccccctgcacccccctccccgagttgctgagcacggcccggcttcgggtgcggggctccgtgcggggcgtggcgcggggctcgccgtgccgggcggggggtggcggcaggtgggggtgccgggcggggcggggccgcctcgggccggggagggctcgggggaggggcgcggcggcccccggagcgccggcgcatagctcttatgatagcaatgtcagcagtgcctttctcgaagtgcttctgccgggttaagattctaaaattatcacggtagaaacatcttcgggagaagtaaggttgaccatactctacagttgtgtctagagcctctgctaaccatgttcatgccttcttctttttcctacagctcctgggcaacgtgctggttattgtgaccggtcgctagccaccatggtgagcaagggcgaggagctgttcaccggggtggtgcccatcctggtcgagctggacggcgacgtaaacggccacaagttcagcgtgtccggcgagggcgagggcgatgccacctacggcaagctgaccctgaagttcatctgcaccaccggcaagctgcccgtgccctggcccaccctcgtgaccaccctgacctacggcgtgcagtgcttcagccgctaccccgaccacatgaagcagcacgacttcttcaagtccgccatgcccgaaggctacgtccaggagcgcaccatcttcttcaaggacgacggcaactacaagacccgcgccgaggtgaagttcgagggcgacaccctggtgaaccgcatcgagctgaagggcatcgacttcaaggaggacggcaacatcctggggcacaagctggagtacaactacaacagccacaacgtctatatcatggccgacaagcagaagaacggcatcaaggtgaacttcaagatccgccacaacatcgaggacggcagcgtgcagctcgccgaccactaccagcagaacacccccatcggcgacggccccgtgctgctgcccgacaaccactacctgagcacccagtccgccctgagcaaagaccccaacgagaagcgcgatcacatggtcctgctggagttcgtgaccgccgccgggatcactctcggcatggacgagctgtacaagtaacctgcaggcgccggcgcatagctcttatgatagcaatgtcagcagtgcctttctcgaagtgcttctgccgggttaagattctaaaattatcacggtagaaacatcttcgggagaagtaaggttgaccatactctacagttgtggagctcgctgatcagcctcgactgtgccttctagttgccagccatctgttgtttgcccctcccccgtgccttccttgaccctggaaggtgccactcccactgtcctttcctaataaaatgaggaaattgcatcgcattgtctgagtaggtgtcattctattctggggggtggggtggggcaggacagcaagggggaggattgggaagacaatagcaggcatgctggggatgcggtgggctctatggaagcttgaattcagctgacgtgcctcggaccgctaggaacccctagtgatggagttggccactccctctctgcgcgctcgctcgctcactgaggccgggcgaccaaaggtcgcccgacgcccgggctttgcccgggcggcctcagtgagcgagcgagcgcgcag

SEQ ID NO: 185 - DNA, 2978 bp, Artificial Sequence
  source: /note="Description of Artificial Sequence: Synthetic polynucleotide"
ctgcgcgctcgctcgctcactgaggccgcccgggcgtcgggcgacctttggtcgcccggcctcagtgagcgagcgagcgcgcagagagggagtggccaactccatcactaggggttcctgcggccgcacgcgtgacattgattattgactagttattaatagtaatcaattacggggtcattagttcatagcccatatatggagttccgcgttacataacttacggtaaatggcccgcctggctgaccgcccaacgacccccgcccattgacgtcaataatgacgtatgttcccatagtaacgccaatagggactttccattgacgtcaatgggtggactatttacggtaaactgcccacttggcagtacatcaagtgtatcatatgccaagtacgccccctattgacgtcaatgacggtaaatggcccgcctggcattatgcccagtacatgaccttatgggactttcctacttggcagtacatctacgtattagtcatcgctattaccatgggtcgaggtgagccccacgttctgcttcactctccccatctcccccccctccccacccccaattttgtatttatttattttttaattattttgtgcagcgatgggggcggggggggggggggcgcgcgccaggcggggcggggcggggcgaggggcggggcggggcgaggcggagaggtgcggcggcagccaatcagagcggcgcgctccgaaagtttccttttatggcgaggcggcggcggcggcggccctataaaaagcgaagcgcgcggcgggcgggagtcgctgcgttgccttcgccccgtgccccgctccgcgccgcctcgcgccgcccgccccggctctgactgaccgcgttactcccacaggtgagcgggcgggacggcccttctcctccgggctgtaattagcgcttggtttaatgacggctcgtttcttttctgtggctgcgtgaaagccttaaagggctccgggagggccctttgtgcgggggggagcggctcggggggtgcgtgcgtgtgtgtgtgcgtggggagcgccgcgtgcggcccgcgctgcccggcggctgtgagcgctgcgggcgcggcgcggggctttgtgcgctccgcgtgtgcgcgaggggagcgcggccgggggcggtgccccgcggtgcgggggggctgcgaggggaacaaaggctgcgtgcggggtgtgtgcgtgggggggtgagcagggggtgtgggcgcggcggtcgggctgtaacccccccctgcacccccctccccgagttgctgagcacggcccggcttcgggtgcggggctccgtgcggggcgtggcgcggggctcgccgtgccgggcggggggtggcggcaggtgggggtgccgggcggggcggggccgcctcgggccggggagggctcgggggaggggcgcggcggcccccggagcgccggcggagcaggaggaccaaggccctggcgaaggccgtggcctcgttctcgaagtgcttctgccggtgtgcaggtcccaatggccggtagaatcgtttcgagcacggggacgcgggcctggacgccggcatccgggctcaggacccccctctctagagcctctgctaaccatgttcatgccttcttctttttcctacagctcctgggcaacgtgctggttattgtgaccggtcgctagccaccatggtgagcaagggcgaggagctgttcaccggggtggtgcccatcctggtcgagctggacggcgacgtaaacggccacaagttcagcgtgtccggcgagggcgagggcgatgccacctacggcaagctgaccctgaagttcatctgcaccaccggcaagctgcccgtgccctggcccaccctcgtgaccaccctgacctacggcgtgcagtgcttcagccgctaccccgaccacatgaagcagcacgacttcttcaagtccgccatgcccgaaggctacgtccaggagcgcaccatcttcttcaaggacgacggcaactacaagacccgcgccgaggtgaagttcgagggcgacaccctggtgaaccgcatcgagctgaagggcatcgacttcaaggaggacggcaacatcctggggcacaagctggagtacaactacaacagccacaacgtctatatcatggccgacaagcagaagaacggcatcaaggtgaacttcaagatccgccacaacatcgaggacggcagcgtgcagctcgccgaccactaccagcagaacacccccatcggcgacggccccgtgctgctgcccgacaaccactacctgagcacccagtccgccctgagcaaagaccccaacgagaagcgcgatcacatggtcctgctggagttcgtgaccgccgccgggatcactctcggcatggacgagctgtacaagtaacctgcaggcgccggcggagcaggaggaccaaggccctggcgaaggccgtggcctcgttctcgaagtgcttctgccggtgtgcaggtcccaatggccggtagaatcgtttcgagcacggggacgcgggcctggacgccggcatccgggctcaggacccccctcgagctcgctgatcagcctcgactgtgccttctagttgccagccatctgttgtttgcccctcccccgtgccttccttgaccctggaaggtgccactcccactgtcctttcctaataaaatgaggaaattgcatcgcattgtctgagtaggtgtcattctattctggggggtggggtggggcaggacagcaagggggaggattgggaagacaatagcaggcatgctggggatgcggtgggctctatggaagcttgaattcagctgacgtgcctcggaccgctaggaacccctagtgatggagttggccactccctctctgcgcgctcgctcgctcactgaggccgggcgaccaaaggtcgcccgacgcccgggctttgcccgggcggcctcagtgagcgagcgagcgcgcag

SEQ ID NO: 186 - DNA, 2982 bp, Artificial Sequence
  source: /note="Description of Artificial Sequence: Synthetic polynucleotide"
ctgcgcgctcgctcgctcactgaggccgcccgggcgtcgggcgacctttggtcgcccggcctcagtgagcgagcgagcgcgcagagagggagtggccaactccatcactaggggttcctgcggccgcacgcgtgacattgattattgactagttattaatagtaatcaattacggggtcattagttcatagcccatatatggagttccgcgttacataacttacggtaaatggcccgcctggctgaccgcccaacgacccccgcccattgacgtcaataatgacgtatgttcccatagtaacgccaatagggactttccattgacgtcaatgggtggactatttacggtaaactgcccacttggcagtacatcaagtgtatcatatgccaagtacgccccctattgacgtcaatgacggtaaatggcccgcctggcattatgcccagtacatgaccttatgggactttcctacttggcagtacatctacgtattagtcatcgctattaccatgggtcgaggtgagccccacgttctgcttcactctccccatctcccccccctccccacccccaattttgtatttatttattttttaattattttgtgcagcgatgggggcggggggggggggggcgcgcgccaggcggggcggggcggggcgaggggcggggcggggcgaggcggagaggtgcggcggcagccaatcagagcggcgcgctccgaaagtttccttttatggcgaggcggcggcggcggcggccctataaaaagcgaagcgcgcggcgggcgggagtcgctgcgttgccttcgccccgtgccccgctccgcgccgcctcgcgccgcccgccccggctctgactgaccgcgttactcccacaggtgagcgggcgggacggcccttctcctccgggctgtaattagcgcttggtttaatgacggctcgtttcttttctgtggctgcgtgaaagccttaaagggctccgggagggccctttgtgcgggggggagcggctcggggggtgcgtgcgtgtgtgtgtgcgtggggagcgccgcgtgcggcccgcgctgcccggcggctgtgagcgctgcgggcgcggcgcggggctttgtgcgctccgcgtgtgcgcgaggggagcgcggccgggggcggtgccccgcggtgcgggggggctgcgaggggaacaaaggctgcgtgcggggtgtgtgcgtgggggggtgagcagggggtgtgggcgcggcggtcgggctgtaacccccccctgcacccccctccccgagttgctgagcacggcccggcttcgggtgcggggctccgtgcggggcgtggcgcggggctcgccgtgccgggcggggggtggcggcaggtgggggtgccgggcggggcggggccgcctcgggccggggagggctcgggggaggggcgcggcggcccccggagcgccggcggtgtccccagagagcccgcaccagtgccatctgcttggccgatttctcgaagtgcttctgccggcttgtgtctctccgctctgagctgtgaggagctttcgggatatgggaaaagcaggacccgcagctgcgtccgcctcccctgcattctagagcctctgctaaccatgttcatgccttcttctttttcctacagctcctgggcaacgtgctggttattgtgaccggtcgctagccaccatggtgagcaagggcgaggagctgttcaccggggtggtgcccatcctggtcgagctggacggcgacgtaaacggccacaagttcagcgtgtccggcgagggcgagggcgatgccacctacggcaagctgaccctgaagttcatctgcaccaccggcaagctgcccgtgccctggcccaccctcgtgaccaccctgacctacggcgtgcagtgcttcagccgctaccccgaccacatgaagcagcacgacttcttcaagtccgccatgcccgaaggctacgtccaggagcgcaccatcttcttcaaggacgacggcaactacaagacccgcgccgaggtgaagttcgagggcgacaccctggtgaaccgcatcgagctgaagggcatcgacttcaaggaggacggcaacatcctggggcacaagctggagtacaactacaacagccacaacgtctatatcatggccgacaagcagaagaacggcatcaaggtgaacttcaagatccgccacaacatcgaggacggcagcgtgcagctcgccgaccactaccagcagaacacccccatcggcgacggccccgtgctgctgcccgacaaccactacctgagcacccagtccgccctgagcaaagaccccaacgagaagcgcgatcacatggtcctgctggagttcgtgaccgccgccgggatcactctcggcatggacgagctgtacaagtaacctgcaggcgccggcggtgtccccagagagcccgcaccagtgccatctgcttggccgatttctcgaagtgcttctgccggcttgtgtctctccgctctgagctgtgaggagctttcgggatatgggaaaagcaggacccgcagctgcgtccgcctcccctgcatgagctcgctgatcagcctcgactgtgccttctagttgccagccatctgttgtttgcccctcccccgtgccttccttgaccctggaaggtgccactcccactgtcctttcctaataaaatgaggaaattgcatcgcattgtctgagtaggtgtcattctattctggggggtggggtggggcaggacagcaagggggaggattgggaagacaatagcaggcatgctggggatgcggtgggctctatggaagcttgaattcagctgacgtgcctcggaccgctaggaacccctagtgatggagttggccactccctctctgcgcgctcgctcgctcactgaggccgggcgaccaaaggtcgcccgacgcccgggctttgcccgggcggcctcagtgagcgagcgagcgcgcag

SEQ ID NO: 187 - DNA, 2940 bp, Artificial Sequence
  source: /note="Description of Artificial Sequence: Synthetic polynucleotide"
ctgcgcgctcgctcgctcactgaggccgcccgggcgtcgggcgacctttggtcgcccggcctcagtgagcgagcgagcgcgcagagagggagtggccaactccatcactaggggttcctgcggccgcacgcgtgacattgattattgactagttattaatagtaatcaattacggggtcattagttcatagcccatatatggagttccgcgttacataacttacggtaaatggcccgcctggctgaccgcccaacgacccccgcccattgacgtcaataatgacgtatgttcccatagtaacgccaatagggactttccattgacgtcaatgggtggactatttacggtaaactgcccacttggcagtacatcaagtgtatcatatgccaagtacgccccctattgacgtcaatgacggtaaatggcccgcctggcattatgcccagtacatgaccttatgggactttcctacttggcagtacatctacgtattagtcatcgctattaccatgggtcgaggtgagccccacgttctgcttcactctccccatctcccccccctccccacccccaattttgtatttatttattttttaattattttgtgcagcgatgggggcggggggggggggggcgcgcgccaggcggggcggggcggggcgaggggcggggcggggcgaggcggagaggtgcggcggcagccaatcagagcggcgcgctccgaaagtttccttttatggcgaggcggcggcggcggcggccctataaaaagcgaagcgcgcggcgggcgggagtcgctgcgttgccttcgccccgtgccccgctccgcgccgcctcgcgccgcccgccccggctctgactgaccgcgttactcccacaggtgagcgggcgggacggcccttctcctccgggctgtaattagcgcttggtttaatgacggctcgtttcttttctgtggctgcgtgaaagccttaaagggctccgggagggccctttgtgcgggggggagcggctcggggggtgcgtgcgtgtgtgtgtgcgtggggagcgccgcgtgcggcccgcgctgcccggcggctgtgagcgctgcgggcgcggcgcggggctttgtgcgctccgcgtgtgcgcgaggggagcgcggccgggggcggtgccccgcggtgcgggggggctgcgaggggaacaaaggctgcgtgcggggtgtgtgcgtgggggggtgagcagggggtgtgggcgcggcggtcgggctgtaacccccccctgcacccccctccccgagttgctgagcacggcccggcttcgggtgcggggctccgtgcggggcgtggcgcggggctcgccgtgccgggcggggggtggcggcaggtgggggtgccgggcggggcggggccgcctcgggccggggagggctcgggggaggggcgcggcggcccccggagcgccggcgcatagctcttatgatagcaatgtcagcagtgcctttctcgaagtgcttctgccgggttaagattctaaaattatcacggtagaaacatcttcgggagaagtaaggttgaccatactctacagttgtgtctagagcctctgctaaccatgttcatgccttcttctttttcctacagctcctgggcaacgtgctggttattgtgaccggtcgctagccaccatggtgagcaagggcgaggagctgttcaccggggtggtgcccatcctggtcgagctggacggcgacgtaaacggccacaagttcagcgtgtccggcgagggcgagggcgatgccacctacggcaagctgaccctgaagttcatctgcaccaccggcaagctgcccgtgccctggcccaccctcgtgaccaccctgacctacggcgtgcagtgcttcagccgctaccccgaccacatgaagcagcacgacttcttcaagtccgccatgcccgaaggctacgtccaggagcgcaccatcttcttcaaggacgacggcaactacaagacccgcgccgaggtgaagttcgagggcgacaccctggtgaaccgcatcgagctgaagggcatcgacttcaaggaggacggcaacatcctggggcacaagctggagtacaactacaacagccacaacgtctatatcatggccgacaagcagaagaacggcatcaaggtgaacttcaagatccgccacaacatcgaggacggcagcgtgcagctcgccgaccactaccagcagaacacccccatcggcgacggccccgtgctgctgcccgacaaccactacctgagcacccagtccgccctgagcaaagaccccaacgagaagcgcgatcacatggtcctgctggagttcgtgaccgccgccgggatcactctcggcatggacgagctgtacaagtaacctgcaggcgccggcgcatagctcttatgatagcaatgtcagcagtgcctttctccaccttgaccacgcgtgttaagattctaaaattatctcgtgtggtaagtggtggagagaagtaaggttgaccatactctacagttgtggagctcgctgatcagcctcgactgtgccttctagttgccagccatctgttgtttgcccctcccccgtgccttccttgaccctggaaggtgccactcccactgtcctttcctaataaaatgaggaaattgcatcgcattgtctgagtaggtgtcattctattctggggggtggggtggggcaggacagcaagggggaggattgggaagacaatagcaggcatgctggggatgcggtgggctctatggaagcttgaattcagctgacgtgcctcggaccgctaggaacccctagtgatggagttggccactccctctctgcgcgctcgctcgctcactgaggccgggcgaccaaaggtcgcccgacgcccgggctttgcccgggcggcctcagtgagcgagcgagcgcgcag

SEQ ID NO: 188 - DNA, 2978 bp, Artificial Sequence
  source: /note="Description of Artificial Sequence: Synthetic polynucleotide"
ctgcgcgctcgctcgctcactgaggccgcccgggcgtcgggcgacctttggtcgcccggcctcagtgagcgagcgagcgcgcagagagggagtggccaactccatcactaggggttcctgcggccgcacgcgtgacattgattattgactagttattaatagtaatcaattacggggtcattagttcatagcccatatatggagttccgcgttacataacttacggtaaatggcccgcctggctgaccgcccaacgacccccgcccattgacgtcaataatgacgtatgttcccatagtaacgccaatagggactttccattgacgtcaatgggtggactatttacggtaaactgcccacttggcagtacatcaagtgtatcatatgccaagtacgccccctattgacgtcaatgacggtaaatggcccgcctggcattatgcccagtacatgaccttatgggactttcctacttggcagtacatctacgtattagtcatcgctattaccatgggtcgaggtgagccccacgttctgcttcactctccccatctcccccccctccccacccccaattttgtatttatttattttttaattattttgtgcagcgatgggggcggggggggggggggcgcgcgccaggcggggcggggcggggcgaggggcggggcggggcgaggcggagaggtgcggcggcagccaatcagagcggcgcgctccgaaagtttccttttatggcgaggcggcggcggcggcggccctataaaaagcgaagcgcgcggcgggcgggagtcgctgcgttgccttcgccccgtgccccgctccgcgccgcctcgcgccgcccgccccggctctgactgaccgcgttactcccacaggtgagcgggcgggacggcccttctcctccgggctgtaattagcgcttggtttaatgacggctcgtttcttttctgtggctgcgtgaaagccttaaagggctccgggagggccctttgtgcgggggggagcggctcggggggtgcgtgcgtgtgtgtgtgcgtggggagcgccgcgtgcggcccgcgctgcccggcggctgtgagcgctgcgggcgcggcgcggggctttgtgcgctccgcgtgtgcgcgaggggagcgcggccgggggcggtgccccgcggtgcgggggggctgcgaggggaacaaaggctgcgtgcggggtgtgtgcgtgggggggtgagcagggggtgtgggcgcggcggtcgggctgtaacccccccctgcacccccctccccgagttgctgagcacggcccggcttcgggtgcggggctccgtgcggggcgtggcgcggggctcgccgtgccgggcggggggtggcggcaggtgggggtgccgggcggggcggggccgcctcgggccggggagggctcgggggaggggcgcggcggcccccggagcgccggcggagcaggaggaccaaggccctggcgaaggccgtggcctcgttctcgaagtgcttctgccggtgtgcaggtcccaatggccggtagaatcgtttcgagcacggggacgcgggcctggacgccggcatccgggctcaggacccccctctctagagcctctgctaaccatgttcatgccttcttctttttcctacagctcctgggcaacgtgctggttattgtgaccggtcgctagccaccatggtgagcaagggcgaggagctgttcaccggggtggtgcccatcctggtcgagctggacggcgacgtaaacggccacaagttcagcgtgtccggcgagggcgagggcgatgccacctacggcaagctgaccctgaagttcatctgcaccaccggcaagctgcccgtgccctggcccaccctcgtgaccaccctgacctacggcgtgcagtgcttcagccgctaccccgaccacatgaagcagcacgacttcttcaagtccgccatgcccgaaggctacgtccaggagcgcaccatcttcttcaaggacgacggcaactacaagacccgcgccgaggtgaagttcgagggcgacaccctggtgaaccgcatcgagctgaagggcatcgacttcaaggaggacggcaacatcctggggcacaagctggagtacaactacaacagccacaacgtctatatcatggccgacaagcagaagaacggcatcaaggtgaacttcaagatccgccacaacatcgaggacggcagcgtgcagctcgccgaccactaccagcagaacacccccatcggcgacggccccgtgctgctgcccgacaaccactacctgagcacccagtccgccctgagcaaagaccccaacgagaagcgcgatcacatggtcctgctggagttcgtgaccgccgccgggatcactctcggcatggacgagctgtacaagtaacctgcaggcgccggcggagcaggaggaccaaggccctggcgaaggccgtggcctcgttctccaccttgaccacgcgttgtgcaggtcccaatgggcgtgtggtagaggtggagcacggggacgcgggcctggacgccggcatccgggctcaggacccccctcgagctcgctgatcagcctcgactgtgccttctagttgccagccatctgttgtttgcccctcccccgtgccttccttgaccctggaaggtgccactcccactgtcctttcctaataaaatgaggaaattgcatcgcattgtctgagtaggtgtcattctattctggggggtggggtggggcaggacagcaagggggaggattgggaagacaatagcaggcatgctggggatgcggtgggctctatggaagcttgaattcagctgacgtgcctcggaccgctaggaacccctagtgatggagttggccactccctctctgcgcgctcgctcgctcactgaggccgggcgaccaaaggtcgcccgacgcccgggctttgcccgggcggcctcagtgagcgagcgagcgcgcag

SEQ ID NO: 189 - DNA, 2982 bp, Artificial Sequence
  source: /note="Description of Artificial Sequence: Synthetic polynucleotide"
ctgcgcgctcgctcgctcactgaggccgcccgggcgtcgggcgacctttggtcgcccggcctcagtgagcgagcgagcgcgcagagagggagtggccaactccatcactaggggttcctgcggccgcacgcgtgacattgattattgactagttattaatagtaatcaattacggggtcattagttcatagcccatatatggagttccgcgttacataacttacggtaaatggcccgcctggctgaccgcccaacgacccccgcccattgacgtcaataatgacgtatgttcccatagtaacgccaatagggactttccattgacgtcaatgggtggactatttacggtaaactgcccacttggcagtacatcaagtgtatcatatgccaagtacgccccctattgacgtcaatgacggtaaatggcccgcctggcattatgcccagtacatgaccttatgggactttcctacttggcagtacatctacgtattagtcatcgctattaccatgggtcgaggtgagccccacgttctgcttcactctccccatctcccccccctccccacccccaattttgtatttatttattttttaattattttgtgcagcgatgggggcggggggggggggggcgcgcgccaggcggggcggggcggggcgaggggcggggcggggcgaggcggagaggtgcggcggcagccaatcagagcggcgcgctccgaaagtttccttttatggcgaggcggcggcggcggcggccctataaaaagcgaagcgcgcggcgggcgggagtcgctgcgttgccttcgccccgtgccccgctccgcgccgcctcgcgccgcccgccccggctctgactgaccgcgttactcccacaggtgagcgggcgggacggcccttctcctccgggctgtaattagcgcttggtttaatgacggctcgtttcttttctgtggctgcgtgaaagccttaaagggctccgggagggccctttgtgcgggggggagcggctcggggggtgcgtgcgtgtgtgtgtgcgtggggagcgccgcgtgcggcccgcgctgcccggcggctgtgagcgctgcgggcgcggcgcggggctttgtgcgctccgcgtgtgcgcgaggggagcgcggccgggggcggtgccccgcggtgcgggggggctgcgaggggaacaaaggctgcgtgcggggtgtgtgcgtgggggggtgagcagggggtgtgggcgcggcggtcgggctgtaacccccccctgcacccccctccccgagttgctgagcacggcccggcttcgggtgcggggctccgtgcggggcgtggcgcggggctcgccgtgccgggcggggggtggcggcaggtgggggtgccgggcggggcggggccgcctcgggccggggagggctcgggggaggggcgcggcggcccccggagcgccggcggtgtccccagagagcccgcaccagtgccatctgcttggccgatttctcgaagtgcttctgccggcttgtgtctctccgctctgagctgtgaggagctttcgggatatgggaaaagcaggacccgcagctgcgtccgcctcccctgcattctagagcctctgctaaccatgttcatgccttcttctttttcctacagctcctgggcaacgtgctggttattgtgaccggtcgctagccaccatggtgagcaagggcgaggagctgttcaccggggtggtgcccatcctggtcgagctggacggcgacgtaaacggccacaagttcagcgtgtccggcgagggcgagggcgatgccacctacggcaagctgaccctgaagttcatctgcaccaccggcaagctgcccgtgccctggcccaccctcgtgaccaccctgacctacggcgtgcagtgcttcagccgctaccccgaccacatgaagcagcacgacttcttcaagtccgccatgcccgaaggctacgtccaggagcgcaccatcttcttcaaggacgacggcaactacaagacccgcgccgaggtgaagttcgagggcgacaccctggtgaaccgcatcgagctgaagggcatcgacttcaaggaggacggcaacatcctggggcacaagctggagtacaactacaacagccacaacgtctatatcatggccgacaagcagaagaacggcatcaaggtgaacttcaagatccgccacaacatcgaggacggcagcgtgcagctcgccgaccactaccagcagaacacccccatcggcgacggccccgtgctgctgcccgacaaccactacctgagcacccagtccgccctgagcaaagaccccaacgagaagcgcgatcacatggtcctgctggagttcgtgaccgccgccgggatcactctcggcatggacgagctgtacaagtaacctgcaggcgccggcggtgtccccagagagcccgcaccagtgccatctgcttggccgatttctccaccttgaccacgcgtcttgtgtctctccgctctgaggtgactggttgggtggagatatgggaaaagcaggacccgcagctgcgtccgcctcccctgcatgagctcgctgatcagcctcgactgtgccttctagttgccagccatctgttgtttgcccctcccccgtgccttccttgaccctggaaggtgccactcccactgtcctttcctaataaaatgaggaaattgcatcgcattgtctgagtaggtgtcattctattctggggggtggggtggggcaggacagcaagggggaggattgggaagacaatagcaggcatgctggggatgcggtgggctctatggaagcttgaattcagctgacgtgcctcggaccgctaggaacccctagtgatggagttggccactccctctctgcgcgctcgctcgctcactgaggccgggcgaccaaaggtcgcccgacgcccgggctttgcccgggcggcctcagtgagcgagcgagcgcgcag

SEQ ID NO: 190 - DNA, 2940 bp, Artificial Sequence
  source: /note="Description of Artificial Sequence: Synthetic polynucleotide"
ctgcgcgctcgctcgctcactgaggccgcccgggcgtcgggcgacctttggtcgcccggcctcagtgagcgagcgagcgcgcagagagggagtggccaactccatcactaggggttcctgcggccgcacgcgtgacattgattattgactagttattaatagtaatcaattacggggtcattagttcatagcccatatatggagttccgcgttacataacttacggtaaatggcccgcctggctgaccgcccaacgacccccgcccattgacgtcaataatgacgtatgttcccatagtaacgccaatagggactttccattgacgtcaatgggtggactatttacggtaaactgcccacttggcagtacatcaagtgtatcatatgccaagtacgccccctattgacgtcaatgacggtaaatggcccgcctggcattatgcccagtacatgaccttatgggactttcctacttggcagtacatctacgtattagtcatcgctattaccatgggtcgaggtgagccccacgttctgcttcactctccccatctcccccccctccccacccccaattttgtatttatttattttttaattattttgtgcagcgatgggggcggggggggggggggcgcgcgccaggcggggcggggcggggcgaggggcggggcggggcgaggcggagaggtgcggcggcagccaatcagagcggcgcgctccgaaagtttccttttatggcgaggcggcggcggcggcggccctataaaaagcgaagcgcgcggcgggcgggagtcgctgcgttgccttcgccccgtgccccgctccgcgccgcctcgcgccgcccgccccggctctgactgaccgcgttactcccacaggtgagcgggcgggacggcccttctcctccgggctgtaattagcgcttggtttaatgacggctcgtttcttttctgtggctgcgtgaaagccttaaagggctccgggagggccctttgtgcgggggggagcggctcggggggtgcgtgcgtgtgtgtgtgcgtggggagcgccgcgtgcggcccgcgctgcccggcggctgtgagcgctgcgggcgcggcgcggggctttgtgcgctccgcgtgtgcgcgaggggagcgcggccgggggcggtgccccgcggtgcgggggggctgcgaggggaacaaaggctgcgtgcggggtgtgtgcgtgggggggtgagcagggggtgtgggcgcggcggtcgggctgtaacccccccctgcacccccctccccgagttgctgagcacggcccggcttcgggtgcggggctccgtgcggggcgtggcgcggggctcgccgtgccgggcggggggtggcggcaggtgggggtgccgggcggggcggggccgcctcgggccggggagggctcgggggaggggcgcggcggcccccggagcgccggcgcatagctcttatgatagcaatgtcagcagtgcctttctcgaagtgcttctgccgggttaagattctaaaattatcacggtagaaacatcttcgggagaagtaaggttgaccatactctacagttgtgtctagagcctctgctaaccatgttcatgccttcttctttttcctacagctcctgggcaacgtgctggttattgtgaccggtcgctagccaccatggtgagcaagggcgaggagctgttcaccggggtggtgcccatcctggtcgagctggacggcgacgtaaacggccacaagttcagcgtgtccggcgagggcgagggcgatgccacctacggcaagctgaccctgaagttcatctgcaccaccggcaagctgcccgtgccctggcccaccctcgtgaccaccctgacctacggcgtgcagtgcttcagccgctaccccgaccacatgaagcagcacgacttcttcaagtccgccatgcccgaaggctacgtccaggagcgcaccatcttcttcaaggacgacggcaactacaagacccgcgccgaggtgaagttcgagggcgacaccctggtgaaccgcatcgagctgaagggcatcgacttcaaggaggacggcaacatcctggggcacaagctggagtacaactacaacagccacaacgtctatatcatggccgacaagcagaagaacggcatcaaggtgaacttcaagatccgccacaacatcgaggacggcagcgtgcagctcgccgaccactaccagcagaacacccccatcggcgacggccccgtgctgctgcccgacaaccactacctgagcacccagtccgccctgagcaaagaccccaacgagaagcgcgatcacatggtcctgctggagttcgtgaccgccgccgggatcactctcggcatggacgagctgtacaagtaacctgcaggcgccggcgcatagctcttatgatagcaatgtcagcagtgcctatactgtcatagtagtaccaggttaagattctaaaattatcatggtactaatgttggcagtgtaagtaaggttgaccatactctacagttgtggagctcgctgatcagcctcgactgtgccttctagttgccagccatctgttgtttgcccctcccccgtgccttccttgaccctggaaggtgccactcccactgtcctttcctaataaaatgaggaaattgcatcgcattgtctgagtaggtgtcattctattctggggggtggggtggggcaggacagcaagggggaggattgggaagacaatagcaggcatgctggggatgcggtgggctctatggaagcttgaattcagctgacgtgcctcggaccgctaggaacccctagtgatggagttggccactccctctctgcgcgctcgctcgctcactgaggccgggcgaccaaaggtcgcccgacgcccgggctttgcccgggcggcctcagtgagcgagcgagcgcgcag

SEQ ID NO: 191 - DNA, 2978 bp, Artificial Sequence
  source: /note="Description of Artificial Sequence: Synthetic polynucleotide"
ctgcgcgctcgctcgctcactgaggccgcccgggcgtcgggcgacctttggtcgcccggcctcagtgagcgagcgagcgcgcagagagggagtggccaactccatcactaggggttcctgcggccgcacgcgtgacattgattattgactagttattaatagtaatcaattacggggtcattagttcatagcccatatatggagttccgcgttacataacttacggtaaatggcccgcctggctgaccgcccaacgacccccgcccattgacgtcaataatgacgtatgttcccatagtaacgccaatagggactttccattgacgtcaatgggtggactatttacggtaaactgcccacttggcagtacatcaagtgtatcatatgccaagtacgccccctattgacgtcaatgacggtaaatggcccgcctggcattatgcccagtacatgaccttatgggactttcctacttggcagtacatctacgtattagtcatcgctattaccatgggtcgaggtgagccccacgttctgcttcactctccccatctcccccccctccccacccccaattttgtatttatttattttttaattattttgtgcagcgatgggggcggggggggggggggcgcgcgccaggcggggcggggcggggcgaggggcggggcggggcgaggcggagaggtgcggcggcagccaatcagagcggcgcgctccgaaagtttccttttatggcgaggcggcggcggcggcggccctataaaaagcgaagcgcgcggcgggcgggagtcgctgcgttgccttcgccccgtgccccgctccgcgccgcctcgcgccgcccgccccggctctgactgaccgcgttactcccacaggtgagcgggcgggacggcccttctcctccgggctgtaattagcgcttggtttaatgacggctcgtttcttttctgtggctgcgtgaaagccttaaagggctccgggagggccctttgtgcgggggggagcggctcggggggtgcgtgcgtgtgtgtgtgcgtggggagcgccgcgtgcggcccgcgctgcccggcggctgtgagcgctgcgggcgcggcgcggggctttgtgcgctccgcgtgtgcgcgaggggagcgcggccgggggcggtgccccgcggtgcgggggggctgcgaggggaacaaaggctgcgtgcggggtgtgtgcgtgggggggtgagcagggggtgtgggcgcggcggtcgggctgtaacccccccctgcacccccctccccgagttgctgagcacggcccggcttcgggtgcggggctccgtgcggggcgtggcgcggggctcgccgtgccgggcggggggtggcggcaggtgggggtgccgggcggggcggggccgcctcgggccggggagggctcgggggaggggcgcggcggcccccggagcgccggcggagcaggaggaccaaggccctggcgaaggccgtggcctcgttctcgaagtgcttctgccggtgtgcaggtcccaatggccggtagaatcgtttcgagcacggggacgcgggcctggacgccggcatccgggctcaggacccccctctctagagcctctgctaaccatgttcatgccttcttctttttcctacagctcctgggcaacgtgctggttattgtgaccggtcgctagccaccatggtgagcaagggcgaggagctgttcaccggggtggtgcccatcctggtcgagctggacggcgacgtaaacggccacaagttcagcgtgtccggcgagggcgagggcgatgccacctacggcaagctgaccctgaagttcatctgcaccaccggcaagctgcccgtgccctggcccaccctcgtgaccaccctgacctacggcgtgcagtgcttcagccgctaccccgaccacatgaagcagcacgacttcttcaagtccgccatgcccgaaggctacgtccaggagcgcaccatcttcttcaaggacgacggcaactacaagacccgcgccgaggtgaagttcgagggcgacaccctggtgaaccgcatcgagctgaagggcatcgacttcaaggaggacggcaacatcctggggcacaagctggagtacaactacaacagccacaacgtctatatcatggccgacaagcagaagaacggcatcaaggtgaacttcaagatccgccacaacatcgaggacggcagcgtgcagctcgccgaccactaccagcagaacacccccatcggcgacggccccgtgctgctgcccgacaaccactacctgagcacccagtccgccctgagcaaagaccccaacgagaagcgcgatcacatggtcctgctggagttcgtgaccgccgccgggatcactctcggcatggacgagctgtacaagtaacctgcaggcgccggcggagcaggaggaccaaggccctggcgaaggccgtggcctcgatactgtcatagtagtaccagtgtgcaggtcccaatggctggtactaatgtgacagtctcggggacgcgggcctggacgccggcatccgggctcaggacccccctcgagctcgctgatcagcctcgactgtgccttctagttgccagccatctgttgtttgcccctcccccgtgccttccttgaccctggaaggtgccactcccactgtcctttcctaataaaatgaggaaattgcatcgcattgtctgagtaggtgtcattctattctggggggtggggtggggcaggacagcaagggggaggattgggaagacaatagcaggcatgctggggatgcggtgggctctatggaagcttgaattcagctgacgtgcctcggaccgctaggaacccctagtgatggagttggccactccctctctgcgcgctcgctcgctcactgaggccgggcgaccaaaggtcgcccgacgcccgggctttgcccgggcggcctcagtgagcgagcgagcgcgcag

SEQ ID NO: 192 - DNA, 2982 bp, Artificial Sequence
  source: /note="Description of Artificial Sequence: Synthetic polynucleotide"
ctgcgcgctcgctcgctcactgaggccgcccgggcgtcgggcgacctttggtcgcccggcctcagtgagcgagcgagcgcgcagagagggagtggccaactccatcactaggggttcctgcggccgcacgcgtgacattgattattgactagttattaatagtaatcaattacggggtcattagttcatagcccatatatggagttccgcgttacataacttacggtaaatggcccgcctggctgaccgcccaacgacccccgcccattgacgtcaataatgacgtatgttcccatagtaacgccaatagggactttccattgacgtcaatgggtggactatttacggtaaactgcccacttggcagtacatcaagtgtatcatatgccaagtacgccccctattgacgtcaatgacggtaaatggcccgcctggcattatgcccagtacatgaccttatgggactttcctacttggcagtacatctacgtattagtcatcgctattaccatgggtcgaggtgagccccacgttctgcttcactctccccatctcccccccctccccacccccaattttgtatttatttattttttaattattttgtgcagcgatgggggcggggggggggggggcgcgcgccaggcggggcggggcggggcgaggggcggggcggggcgaggcggagaggtgcggcggcagccaatcagagcggcgcgctccgaaagtttccttttatggcgaggcggcggcggcggcggccctataaaaagcgaagcgcgcggcgggcgggagtcgctgcgttgccttcgccccgtgccccgctccgcgccgcctcgcgccgcccgccccggctctgactgaccgcgttactcccacaggtgagcgggcgggacggcccttctcctccgggctgtaattagcgcttggtttaatgacggctcgtttcttttctgtggctgcgtgaaagccttaaagggctccgggagggccctttgtgcgggggggagcggctcggggggtgcgtgcgtgtgtgtgtgcgtggggagcgccgcgtgcggcccgcgctgcccggcggctgtgagcgctgcgggcgcggcgcggggctttgtgcgctccgcgtgtgcgcgaggggagcgcggccgggggcggtgccccgcggtgcgggggggctgcgaggggaacaaaggctgcgtgcggggtgtgtgcgtgggggggtgagcagggggtgtgggcgcggcggtcgggctgtaacccccccctgcacccccctccccgagttgctgagcacggcccggcttcgggtgcggggctccgtgcggggcgtggcgcggggctcgccgtgccgggcggggggtggcggcaggtgggggtgccgggcggggcggggccgcctcgggccggggagggctcgggggaggggcgcggcggcccccggagcgccggcggtgtccccagagagcccgcaccagtgccatctgcttggccgatttctcgaagtgcttctgccggcttgtgtctctccgctctgagctgtgaggagctttcgggatatgggaaaagcaggacccgcagctgcgtccgcctcccctgcattctagagcctctgctaaccatgttcatgccttcttctttttcctacagctcctgggcaacgtgctggttattgtgaccggtcgctagccaccatggtgagcaagggcgaggagctgttcaccggggtggtgcccatcctggtcgagctggacggcgacgtaaacggccacaagttcagcgtgtccggcgagggcgagggcgatgccacctacggcaagctgaccctgaagttcatctgcaccaccggcaagctgcccgtgccctggcccaccctcgtgaccaccctgacctacggcgtgcagtgcttcagccgctaccccgaccacatgaagcagcacgacttcttcaagtccgccatgcccgaaggctacgtccaggagcgcaccatcttcttcaaggacgacggcaactacaagacccgcgccgaggtgaagttcgagggcgacaccctggtgaaccgcatcgagctgaagggcatcgacttcaaggaggacggcaacatcctggggcacaagctggagtacaactacaacagccacaacgtctatatcatggccgacaagcagaagaacggcatcaaggtgaacttcaagatccgccacaacatcgaggacggcagcgtgcagctcgccgaccactaccagcagaacacccccatcggcgacggccccgtgctgctgcccgacaaccactacctgagcacccagtccgccctgagcaaagaccccaacgagaagcgcgatcacatggtcctgctggagttcgtgaccgccgccgggatcactctcggcatggacgagctgtacaagtaacctgcaggcgccggcggtgtccccagagagcccgcaccagtgccatctgcttggccgatatactgtcatagtagtaccagcttgtgtctctccgctctgagctgtcactgcttgacggtaaatgggaaaagcaggacccgcagctgcgtccgcctcccctgcatgagctcgctgatcagcctcgactgtgccttctagttgccagccatctgttgtttgcccctcccccgtgccttccttgaccctggaaggtgccactcccactgtcctttcctaataaaatgaggaaattgcatcgcattgtctgagtaggtgtcattctattctggggggtggggtggggcaggacagcaagggggaggattgggaagacaatagcaggcatgctggggatgcggtgggctctatggaagcttgaattcagctgacgtgcctcggaccgctaggaacccctagtgatggagttggccactccctctctgcgcgctcgctcgctcactgaggccgggcgaccaaaggtcgcccgacgcccgggctttgcccgggcggcctcagtgagcgagcgagcgcgcag

SEQ ID NO: 193 - DNA, 2940 bp, Artificial Sequence
  source: /note="Description of Artificial Sequence: Synthetic polynucleotide"
ctgcgcgctcgctcgctcactgaggccgcccgggcgtcgggcgacctttggtcgcccggcctcagtgagcgagcgagcgcgcagagagggagtggccaactccatcactaggggttcctgcggccgcacgcgtgacattgattattgactagttattaatagtaatcaattacggggtcattagttcatagcccatatatggagttccgcgttacataacttacggtaaatggcccgcctggctgaccgcccaacgacccccgcccattgacgtcaataatgacgtatgttcccatagtaacgccaatagggactttccattgacgtcaatgggtggactatttacggtaaactgcccacttggcagtacatcaagtgtatcatatgccaagtacgccccctattgacgtcaatgacggtaaatggcccgcctggcattatgcccagtacatgaccttatgggactttcctacttggcagtacatctacgtattagtcatcgctattaccatgggtcgaggtgagccccacgttctgcttcactctccccatctcccccccctccccacccccaattttgtatttatttattttttaattattttgtgcagcgatgggggcggggggggggggggcgcgcgccaggcggggcggggcggggcgaggggcggggcggggcgaggcggagaggtgcggcggcagccaatcagagcggcgcgctccgaaagtttccttttatggcgaggcggcggcggcggcggccctataaaaagcgaagcgcgcggcgggcgggagtcgctgcgttgccttcgccccgtgccccgctccgcgccgcctcgcgccgcccgccccggctctgactgaccgcgttactcccacaggtgagcgggcgggacggcccttctcctccgggctgtaattagcgcttggtttaatgacggctcgtttcttttctgtggctgcgtgaaagccttaaagggctccgggagggccctttgtgcgggggggagcggctcggggggtgcgtgcgtgtgtgtgtgcgtggggagcgccgcgtgcggcccgcgctgcccggcggctgtgagcgctgcgggcgcggcgcggggctttgtgcgctccgcgtgtgcgcgaggggagcgcggccgggggcggtgccccgcggtgcgggggggctgcgaggggaacaaaggctgcgtgcggggtgtgtgcgtgggggggtgagcagggggtgtgggcgcggcggtcgggctgtaacccccccctgcacccccctccccgagttgctgagcacggcccggcttcgggtgcggggctccgtgcggggcgtggcgcggggctcgccgtgccgggcggggggtggcggcaggtgggggtgccgggcggggcggggccgcctcgggccggggagggctcgggggaggggcgcggcggcccccggagcgccggcgcatagctcttatgatagcaatgtcagcagtgcctttctccaccttgaccacgcgtgttaagattctaaaattatctcgtgtggtaagtggtggagagaagtaaggttgaccatactctacagttgtgtctagagcctctgctaaccatgttcatgccttcttctttttcctacagctcctgggcaacgtgctggttattgtgaccggtcgctagccaccatggtgagcaagggcgaggagctgttcaccggggtggtgcccatcctggtcgagctggacggcgacgtaaacggccacaagttcagcgtgtccggcgagggcgagggcgatgccacctacggcaagctgaccctgaagttcatctgcaccaccggcaagctgcccgtgccctggcccaccctcgtgaccaccctgacctacggcgtgcagtgcttcagccgctaccccgaccacatgaagcagcacgacttcttcaagtccgccatgcccgaaggctacgtccaggagcgcaccatcttcttcaaggacgacggcaactacaagacccgcgccgaggtgaagttcgagggcgacaccctggtgaaccgcatcgagctgaagggcatcgacttcaaggaggacggcaacatcctggggcacaagctggagtacaactacaacagccacaacgtctatatcatggccgacaagcagaagaacggcatcaaggtgaacttcaagatccgccacaacatcgaggacggcagcgtgcagctcgccgaccactaccagcagaacacccccatcggcgacggccccgtgctgctgcccgacaaccactacctgagcacccagtccgccctgagcaaagaccccaacgagaagcgcgatcacatggtcctgctggagttcgtgaccgccgccgggatcactctcggcatggacgagctgtacaagtaacctgcaggcgccggcgcatagctcttatgatagcaatgtcagcagtgcctttctccaccttgaccacgcgtgttaagattctaaaattatctcgtgtggtaagtggtggagagaagtaaggttgaccatactctacagttgtggagctcgctgatcagcctcgactgtgccttctagttgccagccatctgttgtttgcccctcccccgtgccttccttgaccctggaaggtgccactcccactgtcctttcctaataaaatgaggaaattgcatcgcattgtctgagtaggtgtcattctattctggggggtggggtggggcaggacagcaagggggaggattgggaagacaatagcaggcatgctggggatgcggtgggctctatggaagcttgaattcagctgacgtgcctcggaccgctaggaacccctagtgatggagttggccactccctctctgcgcgctcgctcgctcactgaggccgggcgaccaaaggtcgcccgacgcccgggctttgcccgggcggcctcagtgagcgagcgagcgcgcag

SEQ ID NO: 194 - DNA, 2978 bp, Artificial Sequence
  source: /note="Description of Artificial Sequence: Synthetic polynucleotide"
ctgcgcgctcgctcgctcactgaggccgcccgggcgtcgggcgacctttggtcgcccggcctcagtgagcgagcgagcgcgcagagagggagtggccaactccatcactaggggttcctgcggccgcacgcgtgacattgattattgactagttattaatagtaatcaattacggggtcattagttcatagcccatatatggagttccgcgttacataacttacggtaaatggcccgcctggctgaccgcccaacgacccccgcccattgacgtcaataatgacgtatgttcccatagtaacgccaatagggactttccattgacgtcaatgggtggactatttacggtaaactgcccacttggcagtacatcaagtgtatcatatgccaagtacgccccctattgacgtcaatgacggtaaatggcccgcctggcattatgcccagtacatgaccttatgggactttcctacttggcagtacatctacgtattagtcatcgctattaccatgggtcgaggtgagccccacgttctgcttcactctccccatctcccccccctccccacccccaattttgtatttatttattttttaattattttgtgcagcgatgggggcggggggggggggggcgcgcgccaggcggggcggggcggggcgaggggcggggcggggcgaggcggagaggtgcggcggcagccaatcagagcggcgcgctccgaaagtttccttttatggcgaggcggcggcggcggcggccctataaaaagcgaagcgcgcggcgggcgggagtcgctgcgttgccttcgccccgtgccccgctccgcgccgcctcgcgccgcccgccccggctctgactgaccgcgttactcccacaggtgagcgggcgggacggcccttctcctccgggctgtaattagcgcttggtttaatgacggctcgtttcttttctgtggctgcgtgaaagccttaaagggctccgggagggccctttgtgcgggggggagcggctcggggggtgcgtgcgtgtgtgtgtgcgtggggagcgccgcgtgcggcccgcgctgcccggcggctgtgagcgctgcgggcgcggcgcggggctttgtgcgctccgcgtgtgcgcgaggggagcgcggccgggggcggtgccccgcggtgcgggggggctgcgaggggaacaaaggctgcgtgcggggtgtgtgcgtgggggggtgagcagggggtgtgggcgcggcggtcgggctgtaacccccccctgcacccccctccccgagttgctgagcacggcccggcttcgggtgcggggctccgtgcggggcgtggcgcggggctcgccgtgccgggcggggggtggcggcaggtgggggtgccgggcggggcggggccgcctcgggccggggagggctcgggggaggggcgcggcggcccccggagcgccggcggagcaggaggaccaaggccctggcgaaggccgtggcctcgttctccaccttgaccacgcgttgtgcaggtcccaatgggcgtgtggtagaggtggagcacggggacgcgggcctggacgccggcatccgggctcaggacccccctctctagagcctctgctaaccatgttcatgccttcttctttttcctacagctcctgggcaacgtgctggttattgtgaccggtcgctagccaccatggtgagcaagggcgaggagctgttcaccggggtggtgcccatcctggtcgagctggacggcgacgtaaacggccacaagttcagcgtgtccggcgagggcgagggcgatgccacctacggcaagctgaccctgaagttcatctgcaccaccggcaagctgcccgtgccctggcccaccctcgtgaccaccctgacctacggcgtgcagtgcttcagccgctaccccgaccacatgaagcagcacgacttcttcaagtccgccatgcccgaaggctacgtccaggagcgcaccatcttcttcaaggacgacggcaactacaagacccgcgccgaggtgaagttcgagggcgacaccctggtgaaccgcatcgagctgaagggcatcgacttcaaggaggacggcaacatcctggggcacaagctggagtacaactacaacagccacaacgtctatatcatggccgacaagcagaagaacggcatcaaggtgaacttcaagatccgccacaacatcgaggacggcagcgtgcagctcgccgaccactaccagcagaacacccccatcggcgacggccccgtgctgctgcccgacaaccactacctgagcacccagtccgccctgagcaaagaccccaacgagaagcgcgatcacatggtcctgctggagttcgtgaccgccgccgggatcactctcggcatggacgagctgtacaagtaacctgcaggcgccggcggagcaggaggaccaaggccctggcgaaggccgtggcctcgttctccaccttgaccacgcgttgtgcaggtcccaatgggcgtgtggtagaggtggagcacggggacgcgggcctggacgccggcatccgggctcaggacccccctcgagctcgctgatcagcctcgactgtgccttctagttgccagccatctgttgtttgcccctcccccgtgccttccttgaccctggaaggtgccactcccactgtcctttcctaataaaatgaggaaattgcatcgcattgtctgagtaggtgtcattctattctggggggtggggtggggcaggacagcaagggggaggattgggaagacaatagcaggcatgctggggatgcggtgggctctatggaagcttgaattcagctgacgtgcctcggaccgctaggaacccctagtgatggagttggccactccctctctgcgcgctcgctcgctcactgaggccgggcgaccaaaggtcgcccgacgcccgggctttgcccgggcggcctcagtgagcgagcgagcgcgcag

SEQ ID NO: 195 - DNA, 2982 bp, Artificial Sequence
  source: /note="Description of Artificial Sequence: Synthetic polynucleotide"
ctgcgcgctcgctcgctcactgaggccgcccgggcgtcgggcgacctttggtcgcccggcctcagtgagcgagcgagcgcgcagagagggagtggccaactccatcactaggggttcctgcggccgcacgcgtgacattgattattgactagttattaatagtaatcaattacggggtcattagttcatagcccatatatggagttccgcgttacataacttacggtaaatggcccgcctggctgaccgcccaacgacccccgcccattgacgtcaataatgacgtatgttcccatagtaacgccaatagggactttccattgacgtcaatgggtggactatttacggtaaactgcccacttggcagtacatcaagtgtatcatatgccaagtacgccccctattgacgtcaatgacggtaaatggcccgcctggcattatgcccagtacatgaccttatgggactttcctacttggcagtacatctacgtattagtcatcgctattaccatgggtcgaggtgagccccacgttctgcttcactctccccatctcccccccctccccacccccaattttgtatttatttattttttaattattttgtgcagcgatgggggcggggggggggggggcgcgcgccaggcggggcggggcggggcgaggggcggggcggggcgaggcggagaggtgcggcggcagccaatcagagcggcgcgctccgaaagtttccttttatggcgaggcggcggcggcggcggccctataaaaagcgaagcgcgcggcgggcgggagtcgctgcgttgccttcgccccgtgccccgctccgcgccgcctcgcgccgcccgccccggctctgactgaccgcgttactcccacaggtgagcgggcgggacggcccttctcctccgggctgtaattagcgcttggtttaatgacggctcgtttcttttctgtggctgcgtgaaagccttaaagggctccgggagggccctttgtgcgggggggagcggctcggggggtgcgtgcgtgtgtgtgtgcgtggggagcgccgcgtgcggcccgcgctgcccggcggctgtgagcgctgcgggcgcggcgcggggctttgtgcgctccgcgtgtgcgcgaggggagcgcggccgggggcggtgccccgcggtgcgggggggctgcgaggggaacaaaggctgcgtgcggggtgtgtgcgtgggggggtgagcagggggtgtgggcgcggcggtcgggctgtaacccccccctgcacccccctccccgagttgctgagcacggcccggcttcgggtgcggggctccgtgcggggcgtggcgcggggctcgccgtgccgggcggggggtggcggcaggtgggggtgccgggcggggcggggccgcctcgggccggggagggctcgggggaggggcgcggcggcccccggagcgccggcggtgtccccagagagcccgcaccagtgccatctgcttggccgatttctccaccttgaccacgcgtcttgtgtctctccgctctgaggtgactggttgggtggagatatgggaaaagcaggacccgcagctgcgtccgcctcccctgcattctagagcctctgctaaccatgttcatgccttcttctttttcctacagctcctgggcaacgtgctggttattgtgaccggtcgctagccaccatggtgagcaagggcgaggagctgttcaccggggtggtgcccatcctggtcgagctggacggcgacgtaaacggccacaagttcagcgtgtccggcgagggcgagggcgatgccacctacggcaagctgaccctgaagttcatctgcaccaccggcaagctgcccgtgccctggcccaccctcgtgaccaccctgacctacggcgtgcagtgcttcagccgctaccccgaccacatgaagcagcacgacttcttcaagtccgccatgcccgaaggctacgtccaggagcgcaccatcttcttcaaggacgacggcaactacaagacccgcgccgaggtgaagttcgagggcgacaccctggtgaaccgcatcgagctgaagggcatcgacttcaaggaggacggcaacatcctggggcacaagctggagtacaactacaacagccacaacgtctatatcatggccgacaagcagaagaacggcatcaaggtgaacttcaagatccgccacaacatcgaggacggcagcgtgcagctcgccgaccactaccagcagaacacccccatcggcgacggccccgtgctgctgcccgacaaccactacctgagcacccagtccgccctgagcaaagaccccaacgagaagcgcgatcacatggtcctgctggagttcgtgaccgccgccgggatcactctcggcatggacgagctgtacaagtaacctgcaggcgccggcggtgtccccagagagcccgcaccagtgccatctgcttggccgatttctccaccttgaccacgcgtcttgtgtctctccgctctgaggtgactggttgggtggagatatgggaaaagcaggacccgcagctgcgtccgcctcccctgcatgagctcgctgatcagcctcgactgtgccttctagttgccagccatctgttgtttgcccctcccccgtgccttccttgaccctggaaggtgccactcccactgtcctttcctaataaaatgaggaaattgcatcgcattgtctgagtaggtgtcattctattctggggggtggggtggggcaggacagcaagggggaggattgggaagacaatagcaggcatgctggggatgcggtgggctctatggaagcttgaattcagctgacgtgcctcggaccgctaggaacccctagtgatggagttggccactccctctctgcgcgctcgctcgctcactgaggccgggcgaccaaaggtcgcccgacgcccgggctttgcccgggcggcctcagtgagcgagcgagcgcgcag

SEQ ID NO: 196 - DNA, 2940 bp, Artificial Sequence
  source: /note="Description of Artificial Sequence: Synthetic polynucleotide"
ctgcgcgctcgctcgctcactgaggccgcccgggcgtcgggcgacctttggtcgcccggcctcagtgagcgagcgagcgcgcagagagggagtggccaactccatcactaggggttcctgcggccgcacgcgtgacattgattattgactagttattaatagtaatcaattacggggtcattagttcatagcccatatatggagttccgcgttacataacttacggtaaatggcccgcctggctgaccgcccaacgacccccgcccattgacgtcaataatgacgtatgttcccatagtaacgccaatagggactttccattgacgtcaatgggtggactatttacggtaaactgcccacttggcagtacatcaagtgtatcatatgccaagtacgccccctattgacgtcaatgacggtaaatggcccgcctggcattatgcccagtacatgaccttatgggactttcctacttggcagtacatctacgtattagtcatcgctattaccatgggtcgaggtgagccccacgttctgcttcactctccccatctcccccccctccccacccccaattttgtatttatttattttttaattattttgtgcagcgatgggggcggggggggggggggcgcgcgccaggcggggcggggcggggcgaggggcggggcggggcgaggcggagaggtgcggcggcagccaatcagagcggcgcgctccgaaagtttccttttatggcgaggcggcggcggcggcggccctataaaaagcgaagcgcgcggcgggcgggagtcgctgcgttgccttcgccccgtgccccgctccgcgccgcctcgcgccgcccgccccggctctgactgaccgcgttactcccacaggtgagcgggcgggacggcccttctcctccgggctgtaattagcgcttggtttaatgacggctcgtttcttttctgtggctgcgtgaaagccttaaagggctccgggagggccctttgtgcgggggggagcggctcggggggtgcgtgcgtgtgtgtgtgcgtggggagcgccgcgtgcggcccgcgctgcccggcggctgtgagcgctgcgggcgcggcgcggggctttgtgcgctccgcgtgtgcgcgaggggagcgcggccgggggcggtgccccgcggtgcgggggggctgcgaggggaacaaaggctgcgtgcggggtgtgtgcgtgggggggtgagcagggggtgtgggcgcggcggtcgggctgtaacccccccctgcacccccctccccgagttgctgagcacggcccggcttcgggtgcggggctccgtgcggggcgtggcgcggggctcgccgtgccgggcggggggtggcggcaggtgggggtgccgggcggggcggggccgcctcgggccggggagggctcgggggaggggcgcggcggcccccggagcgccggcgcatagctcttatgatagcaatgtcagcagtgcctttctccaccttgaccacgcgtgttaagattctaaaattatctcgtgtggtaagtggtggagagaagtaaggttgaccatactctacagttgtgtctagagcctctgctaaccatgttcatgccttcttctttttcctacagctcctgggcaacgtgctggttattgtgaccggtcgctagccaccatggtgagcaagggcgaggagctgttcaccggggtggtgcccatcctggtcgagctggacggcgacgtaaacggccacaagttcagcgtgtccggcgagggcgagggcgatgccacctacggcaagctgaccctgaagttcatctgcaccaccggcaagctgcccgtgccctggcccaccctcgtgaccaccctgacctacggcgtgcagtgcttcagccgctaccccgaccacatgaagcagcacgacttcttcaagtccgccatgcccgaaggctacgtccaggagcgcaccatcttcttcaaggacgacggcaactacaagacccgcgccgaggtgaagttcgagggcgacaccctggtgaaccgcatcgagctgaagggcatcgacttcaaggaggacggcaacatcctggggcacaagctggagtacaactacaacagccacaacgtctatatcatggccgacaagcagaagaacggcatcaaggtgaacttcaagatccgccacaacatcgaggacggcagcgtgcagctcgccgaccactaccagcagaacacccccatcggcgacggccccgtgctgctgcccgacaaccactacctgagcacccagtccgccctgagcaaagaccccaacgagaagcgcgatcacatggtcctgctggagttcgtgaccgccgccgggatcactctcggcatggacgagctgtacaagtaacctgcaggcgccggcgcatagctcttatgatagcaatgtcagcagtgcctatactgtcatagtagtaccaggttaagattctaaaattatcatggtactaatgttggcagtgtaagtaaggttgaccatactctacagttgtggagctcgctgatcagcctcgactgtgccttctagttgccagccatctgttgtttgcccctcccccgtgccttccttgaccctggaaggtgccactcccactgtcctttcctaataaaatgaggaaattgcatcgcattgtctgagtaggtgtcattctattctggggggtggggtggggcaggacagcaagggggaggattgggaagacaatagcaggcatgctggggatgcggtgggctctatggaagcttgaattcagctgacgtgcctcggaccgctaggaacccctagtgatggagttggccactccctctctgcgcgctcgctcgctcactgaggccgggcgaccaaaggtcgcccgacgcccgggctttgcccgggcggcctcagtgagcgagcgagcgcgcag

SEQ ID NO: 197 - DNA, 2978 bp, Artificial Sequence
  source: /note="Description of Artificial Sequence: Synthetic polynucleotide"
ctgcgcgctcgctcgctcactgaggccgcccgggcgtcgggcgacctttggtcgcccggcctcagtgagcgagcgagcgcgcagagagggagtggccaactccatcactaggggttcctgcggccgcacgcgtgacattgattattgactagttattaatagtaatcaattacggggtcattagttcatagcccatatatggagttccgcgttacataacttacggtaaatggcccgcctggctgaccgcccaacgacccccgcccattgacgtcaataatgacgtatgttcccatagtaacgccaatagggactttccattgacgtcaatgggtggactatttacggtaaactgcccacttggcagtacatcaagtgtatcatatgccaagtacgccccctattgacgtcaatgacggtaaatggcccgcctggcattatgcccagtacatgaccttatgggactttcctacttggcagtacatctacgtattagtcatcgctattaccatgggtcgaggtgagccccacgttctgcttcactctccccatctcccccccctccccacccccaattttgtatttatttattttttaattattttgtgcagcgatgggggcggggggggggggggcgcgcgccaggcggggcggggcggggcgaggggcggggcggggcgaggcggagaggtgcggcggcagccaatcagagcggcgcgctccgaaagtttccttttatggcgaggcggcggcggcggcggccctataaaaagcgaagcgcgcggcgggcgggagtcgctgcgttgccttcgccccgtgccccgctccgcgccgcctcgcgccgcccgccccggctctgactgaccgcgttactcccacaggtgagcgggcgggacggcccttctcctccgggctgtaattagcgcttggtttaatgacggctcgtttcttttctgtggctgcgtgaaagccttaaagggctccgggagggccctttgtgcgggggggagcggctcggggggtgcgtgcgtgtgtgtgtgcgtggggagcgccgcgtgcggcccgcgctgcccggcggctgtgagcgctgcgggcgcggcgcggggctttgtgcgctccgcgtgtgcgcgaggggagcgcggccgggggcggtgccccgcggtgcgggggggctgcgaggggaacaaaggctgcgtgcggggtgtgtgcgtgggggggtgagcagggggtgtgggcgcggcggtcgggctgtaacccccccctgcacccccctccccgagttgctgagcacggcccggcttcgggtgcggggctccgtgcggggcgtggcgcggggctcgccgtgccgggcggggggtggcggcaggtgggggtgccgggcggggcggggccgcctcgggccggggagggctcgggggaggggcgcggcggcccccggagcgccggcggagcaggaggaccaaggccctggcgaaggccgtggcctcgttctccaccttgaccacgcgttgtgcaggtcccaatgggcgtgtggtagaggtggagcacggggacgcgggcctggacgccggcatccgggctcaggacccccctctctagagcctctgctaaccatgttcatgccttcttctttttcctacagctcctgggcaacgtgctggttattgtgaccggtcgctagccaccatggtgagcaagggcgaggagctgttcaccggggtggtgcccatcctggtcgagctggacggcgacgtaaacggccacaagttcagcgtgtccggcgagggcgagggcgatgccacctacggcaagctgaccctgaagttcatctgcaccaccggcaagctgcccgtgccctggcccaccctcgtgaccaccctgacctacggcgtgcagtgcttcagccgctaccccgaccacatgaagcagcacgacttcttcaagtccgccatgcccgaaggctacgtccaggagcgcaccatcttcttcaaggacgacggcaactacaagacccgcgccgaggtgaagttcgagggcgacaccctggtgaaccgcatcgagctgaagggcatcgacttcaaggaggacggcaacatcctggggcacaagctggagtacaactacaacagccacaacgtctatatcatggccgacaagcagaagaacggcatcaaggtgaacttcaagatccgccacaacatcgaggacggcagcgtgcagctcgccgaccactaccagcagaacacccccatcggcgacggccccgtgctgctgcccgacaaccactacctgagcacccagtccgccctgagcaaagaccccaacgagaagcgcgatcacatggtcctgctggagttcgtgaccgccgccgggatcactctcggcatggacgagctgtacaagtaacctgcaggcgccggcggagcaggaggaccaaggccctggcgaaggccgtggcctcgatactgtcatagtagtaccagtgtgcaggtcccaatggctggtactaatgtgacagtctcggggacgcgggcctggacgccggcatccgggctcaggacccccctcgagctcgctgatcagcctcgactgtgccttctagttgccagccatctgttgtttgcccctcccccgtgccttccttgaccctggaaggtgccactcccactgtcctttcctaataaaatgaggaaattgcatcgcattgtctgagtaggtgtcattctattctggggggtggggtggggcaggacagcaagggggaggattgggaagacaatagcaggcatgctggggatgcggtgggctctatggaagcttgaattcagctgacgtgcctcggaccgctaggaacccctagtgatggagttggccactccctctctgcgcgctcgctcgctcactgaggccgggcgaccaaaggtcgcccgacgcccgggctttgcccgggcggcctcagtgagcgagcgagcgcgcag

SEQ ID NO: 198 - DNA, 2982 bp, Artificial Sequence
  source: /note="Description of Artificial Sequence: Synthetic polynucleotide"
ctgcgcgctcgctcgctcactgaggccgcccgggcgtcgggcgacctttggtcgcccggcctcagtgagcgagcgagcgcgcagagagggagtggccaactccatcactaggggttcctgcggccgcacgcgtgacattgattattgactagttattaatagtaatcaattacggggtcattagttcatagcccatatatggagttccgcgttacataacttacggtaaatggcccgcctggctgaccgcccaacgacccccgcccattgacgtcaataatgacgtatgttcccatagtaacgccaatagggactttccattgacgtcaatgggtggactatttacggtaaactgcccacttggcagtacatcaagtgtatcatatgccaagtacgccccctattgacgtcaatgacggtaaatggcccgcctggcattatgcccagtacatgaccttatgggactttcctacttggcagtacatctacgtattagtcatcgctattaccatgggtcgaggtgagccccacgttctgcttcactctccccatctcccccccctccccacccccaattttgtatttatttattttttaattattttgtgcagcgatgggggcggggggggggggggcgcgcgccaggcggggcggggcggggcgaggggcggggcggggcgaggcggagaggtgcggcggcagccaatcagagcggcgcgctccgaaagtttccttttatggcgaggcggcggcggcggcggccctataaaaagcgaagcgcgcggcgggcgggagtcgctgcgttgccttcgccccgtgccccgctccgcgccgcctcgcgccgcccgccccggctctgactgaccgcgttactcccacaggtgagcgggcgggacggcccttctcctccgggctgtaattagcgcttggtttaatgacggctcgtttcttttctgtggctgcgtgaaagccttaaagggctccgggagggccctttgtgcgggggggagcggctcggggggtgcgtgcgtgtgtgtgtgcgtggggagcgccgcgtgcggcccgcgctgcccggcggctgtgagcgctgcgggcgcggcgcggggctttgtgcgctccgcgtgtgcgcgaggggagcgcggccgggggcggtgccccgcggtgcgggggggctgcgaggggaacaaaggctgcgtgcggggtgtgtgcgtgggggggtgagcagggggtgtgggcgcggcggtcgggctgtaacccccccctgcacccccctccccgagttgctgagcacggcccggcttcgggtgcggggctccgtgcggggcgtggcgcggggctcgccgtgccgggcggggggtggcggcaggtgggggtgccgggcggggcggggccgcctcgggccggggagggctcgggggaggggcgcggcggcccccggagcgccggcggtgtccccagagagcccgcaccagtgccatctgcttggccgatttctccaccttgaccacgcgtcttgtgtctctccgctctgaggtgactggttgggtggagatatgggaaaagcaggacccgcagctgcgtccgcctcccctgcattctagagcctctgctaaccatgttcatgccttcttctttttcctacagctcctgggcaacgtgctggttattgtgaccggtcgctagccaccatggtgagcaagggcgaggagctgttcaccggggtggtgcccatcctggtcgagctggacggcgacgtaaacggccacaagttcagcgtgtccggcgagggcgagggcgatgccacctacggcaagctgaccctgaagttcatctgcaccaccggcaagctgcccgtgccctggcccaccctcgtgaccaccctgacctacggcgtgcagtgcttcagccgctaccccgaccacatgaagcagcacgacttcttcaagtccgccatgcccgaaggctacgtccaggagcgcaccatcttcttcaaggacgacggcaactacaagacccgcgccgaggtgaagttcgagggcgacaccctggtgaaccgcatcgagctgaagggcatcgacttcaaggaggacggcaacatcctggggcacaagctggagtacaactacaacagccacaacgtctatatcatggccgacaagcagaagaacggcatcaaggtgaacttcaagatccgccacaacatcgaggacggcagcgtgcagctcgccgaccactaccagcagaacacccccatcggcgacggccccgtgctgctgcccgacaaccactacctgagcacccagtccgccctgagcaaagaccccaacgagaagcgcgatcacatggtcctgctggagttcgtgaccgccgccgggatcactctcggcatggacgagctgtacaagtaacctgcaggcgccggcggtgtccccagagagcccgcaccagtgccatctgcttggccgatatactgtcatagtagtaccagcttgtgtctctccgctctgagctgtcactgcttgacggtaaatgggaaaagcaggacccgcagctgcgtccgcctcccctgcatgagctcgctgatcagcctcgactgtgccttctagttgccagccatctgttgtttgcccctcccccgtgccttccttgaccctggaaggtgccactcccactgtcctttcctaataaaatgaggaaattgcatcgcattgtctgagtaggtgtcattctattctggggggtggggtggggcaggacagcaagggggaggattgggaagacaatagcaggcatgctggggatgcggtgggctctatggaagcttgaattcagctgacgtgcctcggaccgctaggaacccctagtgatggagttggccactccctctctgcgcgctcgctcgctcactgaggccgggcgaccaaaggtcgcccgacgcccgggctttgcccgggcggcctcagtgagcgagcgagcgcgcag

SEQ ID NO: 199 - DNA, 2940 bp, Artificial Sequence
  source: /note="Description of Artificial Sequence: Synthetic polynucleotide"
ctgcgcgctcgctcgctcactgaggccgcccgggcgtcgggcgacctttggtcgcccggcctcagtgagcgagcgagcgcgcagagagggagtggccaactccatcactaggggttcctgcggccgcacgcgtgacattgattattgactagttattaatagtaatcaattacggggtcattagttcatagcccatatatggagttccgcgttacataacttacggtaaatggcccgcctggctgaccgcccaacgacccccgcccattgacgtcaataatgacgtatgttcccatagtaacgccaatagggactttccattgacgtcaatgggtggactatttacggtaaactgcccacttggcagtacatcaagtgtatcatatgccaagtacgccccctattgacgtcaatgacggtaaatggcccgcctggcattatgcccagtacatgaccttatgggactttcctacttggcagtacatctacgtattagtcatcgctattaccatgggtcgaggtgagccccacgttctgcttcactctccccatctcccccccctccccacccccaattttgtatttatttattttttaattattttgtgcagcgatgggggcggggggggggggggcgcgcgccaggcggggcggggcggggcgaggggcggggcggggcgaggcggagaggtgcggcggcagccaatcagagcggcgcgctccgaaagtttccttttatggcgaggcggcggcggcggcggccctataaaaagcgaagcgcgcggcgggcgggagtcgctgcgttgccttcgccccgtgccccgctccgcgccgcctcgcgccgcccgccccggctctgactgaccgcgttactcccacaggtgagcgggcgggacggcccttctcctccgggctgtaattagcgcttggtttaatgacggctcgtttcttttctgtggctgcgtgaaagccttaaagggctccgggagggccctttgtgcgggggggagcggctcggggggtgcgtgcgtgtgtgtgtgcgtggggagcgccgcgtgcggcccgcgctgcccggcggctgtgagcgctgcgggcgcggcgcggggctttgtgcgctccgcgtgtgcgcgaggggagcgcggccgggggcggtgccccgcggtgcgggggggctgcgaggggaacaaaggctgcgtgcggggtgtgtgcgtgggggggtgagcagggggtgtgggcgcggcggtcgggctgtaacccccccctgcacccccctccccgagttgctgagcacggcccggcttcgggtgcggggctccgtgcggggcgtggcgcggggctcgccgtgccgggcggggggtggcggcaggtgggggtgccgggcggggcggggccgcctcgggccggggagggctcgggggaggggcgcggcggcccccggagcgccggcgcatagctcttatgatagcaatgtcagcagtgcctatactgtcatagtagtaccaggttaagattctaaaattatcatggtactaatgttggcagtgtaagtaaggttgaccatactctacagttgtgtctagagcctctgctaaccatgttcatgccttcttctttttcctacagctcctgggcaacgtgctggttattgtgaccggtcgctagccaccatggtgagcaagggcgaggagctgttcaccggggtggtgcccatcctggtcgagctggacggcgacgtaaacggccacaagttcagcgtgtccggcgagggcgagggcgatgccacctacggcaagctgaccctgaagttcatctgcaccaccggcaagctgcccgtgccctggcccaccctcgtgaccaccctgacctacggcgtgcagtgcttcagccgctaccccgaccacatgaagcagcacgacttcttcaagtccgccatgcccgaaggctacgtccaggagcgcaccatcttcttcaaggacgacggcaactacaagacccgcgccgaggtgaagttcgagggcgacaccctggtgaaccgcatcgagctgaagggcatcgacttcaaggaggacggcaacatcctggggcacaagctggagtacaactacaacagccacaacgtctatatcatggccgacaagcagaagaacggcatcaaggtgaacttcaagatccgccacaacatcgaggacggcagcgtgcagctcgccgaccactaccagcagaacacccccatcggcgacggccccgtgctgctgcccgacaaccactacctgagcacccagtccgccctgagcaaagaccccaacgagaagcgcgatcacatggtcctgctggagttcgtgaccgccgccgggatcactctcggcatggacgagctgtacaagtaacctgcaggcgccggcgcatagctcttatgatagcaatgtcagcagtgcctatactgtcatagtagtaccaggttaagattctaaaattatcatggtactaatgttggcagtgtaagtaaggttgaccatactctacagttgtggagctcgctgatcagcctcgactgtgccttctagttgccagccatctgttgtttgcccctcccccgtgccttccttgaccctggaaggtgccactcccactgtcctttcctaataaaatgaggaaattgcatcgcattgtctgagtaggtgtcattctattctggggggtggggtggggcaggacagcaagggggaggattgggaagacaatagcaggcatgctggggatgcggtgggctctatggaagcttgaattcagctgacgtgcctcggaccgctaggaacccctagtgatggagttggccactccctctctgcgcgctcgctcgctcactgaggccgggcgaccaaaggtcgcccgacgcccgggctttgcccgggcggcctcagtgagcgagcgagcgcgcag

SEQ ID NO: 200 - DNA, 2978 bp, Artificial Sequence
  source: /note="Description of Artificial Sequence: Synthetic polynucleotide"
ctgcgcgctcgctcgctcactgaggccgcccgggcgtcgggcgacctttggtcgcccggcctcagtgagcgagcgagcgcgcagagagggagtggccaactccatcactaggggttcctgcggccgcacgcgtgacattgattattgactagttattaatagtaatcaattacggggtcattagttcatagcccatatatggagttccgcgttacataacttacggtaaatggcccgcctggctgaccgcccaacgacccccgcccattgacgtcaataatgacgtatgttcccatagtaacgccaatagggactttccattgacgtcaatgggtggactatttacggtaaactgcccacttggcagtacatcaagtgtatcatatgccaagtacgccccctattgacgtcaatgacggtaaatggcccgcctggcattatgcccagtacatgaccttatgggactttcctacttggcagtacatctacgtattagtcatcgctattaccatgggtcgaggtgagccccacgttctgcttcactctccccatctcccccccctccccacccccaattttgtatttatttattttttaattattttgtgcagcgatgggggcggggggggggggggcgcgcgccaggcggggcggggcggggcgaggggcggggcggggcgaggcggagaggtgcggcggcagccaatcagagcggcgcgctccgaaagtttccttttatggcgaggcggcggcggcggcggccctataaaaagcgaagcgcgcggcgggcgggagtcgctgcgttgccttcgccccgtgccccgctccgcgccgcctcgcgccgcccgccccggctctgactgaccgcgttactcccacaggtgagcgggcgggacggcccttctcctccgggctgtaattagcgcttggtttaatgacggctcgtttcttttctgtggctgcgtgaaagccttaaagggctccgggagggccctttgtgcgggggggagcggctcggggggtgcgtgcgtgtgtgtgtgcgtggggagcgccgcgtgcggcccgcgctgcccggcggctgtgagcgctgcgggcgcggcgcggggctttgtgcgctccgcgtgtgcgcgaggggagcgcggccgggggcggtgccccgcggtgcgggggggctgcgaggggaacaaaggctgcgtgcggggtgtgtgcgtgggggggtgagcagggggtgtgggcgcggcggtcgggctgtaacccccccctgcacccccctccccgagttgctgagcacggcccggcttcgggtgcggggctccgtgcggggcgtggcgcggggctcgccgtgccgggcggggggtggcggcaggtgggggtgccgggcggggcggggccgcctcgggccggggagggctcgggggaggggcgcggcggcccccggagcgccggcggagcaggaggaccaaggccctggcgaaggccgtggcctcgatactgtcatagtagtaccagtgtgcaggtcccaatggctggtactaatgtgacagtctcggggacgcgggcctggacgccggcatccgggctcaggacccccctctctagagcctctgctaaccatgttcatgccttcttctttttcctacagctcctgggcaacgtgctggttattgtgaccggtcgctagccaccatggtgagcaagggcgaggagctgttcaccggggtggtgcccatcctggtcgagctggacggcgacgtaaacggccacaagttcagcgtgtccggcgagggcgagggcgatgccacctacggcaagctgaccctgaagttcatctgcaccaccggcaagctgcccgtgccctggcccaccctcgtgaccaccctgacctacggcgtgcagtgcttcagccgctaccccgaccacatgaagcagcacgacttcttcaagtccgccatgcccgaaggctacgtccaggagcgcaccatcttcttcaaggacgacggcaactacaagacccgcgccgaggtgaagttcgagggcgacaccctggtgaaccgcatcgagctgaagggcatcgacttcaaggaggacggcaacatcctggggcacaagctggagtacaactacaacagccacaacgtctatatcatggccgacaagcagaagaacggcatcaaggtgaacttcaagatccgccacaacatcgaggacggcagcgtgcagctcgccgaccactaccagcagaacacccccatcggcgacggccccgtgctgctgcccgacaaccactacctgagcacccagtccgccctgagcaaagaccccaacgagaagcgcgatcacatggtcctgctggagttcgtgaccgccgccgggatcactctcggcatggacgagctgtacaagtaacctgcaggcgccggcggagcaggaggaccaaggccctggcgaaggccgtggcctcgatactgtcatagtagtaccagtgtgcaggtcccaatggctggtactaatgtgacagtctcggggacgcgggcctggacgccggcatccgggctcaggacccccctcgagctcgctgatcagcctcgactgtgccttctagttgccagccatctgttgtttgcccctcccccgtgccttccttgaccctggaaggtgccactcccactgtcctttcctaataaaatgaggaaattgcatcgcattgtctgagtaggtgtcattctattctggggggtggggtggggcaggacagcaagggggaggattgggaagacaatagcaggcatgctggggatgcggtgggctctatggaagcttgaattcagctgacgtgcctcggaccgctaggaacccctagtgatggagttggccactccctctctgcgcgctcgctcgctcactgaggccgggcgaccaaaggtcgcccgacgcccgggctttgcccgggcggcctcagtgagcgagcgagcgcgcag

SEQ ID NO: 201 - DNA, 2982 bp, Artificial Sequence
  source: /note="Description of Artificial Sequence: Synthetic polynucleotide"
ctgcgcgctcgctcgctcactgaggccgcccgggcgtcgggcgacctttggtcgcccggcctcagtgagcgagcgagcgcgcagagagggagtggccaactccatcactaggggttcctgcggccgcacgcgtgacattgattattgactagttattaatagtaatcaattacggggtcattagttcatagcccatatatggagttccgcgttacataacttacggtaaatggcccgcctggctgaccgcccaacgacccccgcccattgacgtcaataatgacgtatgttcccatagtaacgccaatagggactttccattgacgtcaatgggtggactatttacggtaaactgcccacttggcagtacatcaagtgtatcatatgccaagtacgccccctattgacgtcaatgacggtaaatggcccgcctggcattatgcccagtacatgaccttatgggactttcctacttggcagtacatctacgtattagtcatcgctattaccatgggtcgaggtgagccccacgttctgcttcactctccccatctcccccccctccccacccccaattttgtatttatttattttttaattattttgtgcagcgatgggggcggggggggggggggcgcgcgccaggcggggcggggcggggcgaggggcggggcggggcgaggcggagaggtgcggcggcagccaatcagagcggcgcgctccgaaagtttccttttatggcgaggcggcggcggcggcggccctataaaaagcgaagcgcgcggcgggcgggagtcgctgcgttgccttcgccccgtgccccgctccgcgccgcctcgcgccgcccgccccggctctgactgaccgcgttactcccacaggtgagcgggcgggacggcccttctcctccgggctgtaattagcgcttggtttaatgacggctcgtttcttttctgtggctgcgtgaaagccttaaagggctccgggagggccctttgtgcgggggggagcggctcggggggtgcgtgcgtgtgtgtgtgcgtggggagcgccgcgtgcggcccgcgctgcccggcggctgtgagcgctgcgggcgcggcgcggggctttgtgcgctccgcgtgtgcgcgaggggagcgcggccgggggcggtgccccgcggtgcgggggggctgcgaggggaacaaaggctgcgtgcggggtgtgtgcgtgggggggtgagcagggggtgtgggcgcggcggtcgggctgtaacccccccctgcacccccctccccgagttgctgagcacggcccggcttcgggtgcggggctccgtgcggggcgtggcgcggggctcgccgtgccgggcggggggtggcggcaggtgggggtgccgggcggggcggggccgcctcgggccggggagggctcgggggaggggcgcggcggcccccggagcgccggcggtgtccccagagagcccgcaccagtgccatctgcttggccgatatactgtcatagtagtaccagcttgtgtctctccgctctgagctgtcactgcttgacggtaaatgggaaaagcaggacccgcagctgcgtccgcctcccctgcattctagagcctctgctaaccatgttcatgccttcttctttttcctacagctcctgggcaacgtgctggttattgtgaccggtcgctagccaccatggtgagcaagggcgaggagctgttcaccggggtggtgcccatcctggtcgagctggacggcgacgtaaacggccacaagttcagcgtgtccggcgagggcgagggcgatgccacctacggcaagctgaccctgaagttcatctgcaccaccggcaagctgcccgtgccctggcccaccctcgtgaccaccctgacctacggcgtgcagtgcttcagccgctaccccgaccacatgaagcagcacgacttcttcaagtccgccatgcccgaaggctacgtccaggagcgcaccatcttcttcaaggacgacggcaactacaagacccgcgccgaggtgaagttcgagggcgacaccctggtgaaccgcatcgagctgaagggcatcgacttcaaggaggacggcaacatcctggggcacaagctggagtacaactacaacagccacaacgtctatatcatggccgacaagcagaagaacggcatcaaggtgaacttcaagatccgccacaacatcgaggacggcagcgtgcagctcgccgaccactaccagcagaacacccccatcggcgacggccccgtgctgctgcccgacaaccactacctgagcacccagtccgccctgagcaaagaccccaacgagaagcgcgatcacatggtcctgctggagttcgtgaccgccgccgggatcactctcggcatggacgagctgtacaagtaacctgcaggcgccggcggtgtccccagagagcccgcaccagtgccatctgcttggccgatatactgtcatagtagtaccagcttgtgtctctccgctctgagctgtcactgcttgacggtaaatgggaaaagcaggacccgcagctgcgtccgcctcccctgcatgagctcgctgatcagcctcgactgtgccttctagttgccagccatctgttgtttgcccctcccccgtgccttccttgaccctggaaggtgccactcccactgtcctttcctaataaaatgaggaaattgcatcgcattgtctgagtaggtgtcattctattctggggggtggggtggggcaggacagcaagggggaggattgggaagacaatagcaggcatgctggggatgcggtgggctctatggaagcttgaattcagctgacgtgcctcggaccgctaggaacccctagtgatggagttggccactccctctctgcgcgctcgctcgctcactgaggccgggcgaccaaaggtcgcccgacgcccgggctttgcccgggcggcctcagtgagcgagcgagcgcgcag

SEQ ID NO: 202 - DNA, 2952 bp, Artificial Sequence
  source: /note="Description of Artificial Sequence: Synthetic polynucleotide"
ctgcgcgctcgctcgctcactgaggccgcccgggcgtcgggcgacctttggtcgcccggcctcagtgagcgagcgagcgcgcagagagggagtggccaactccatcactaggggttcctgcggccgcacgcgtgacattgattattgactagttattaatagtaatcaattacggggtcattagttcatagcccatatatggagttccgcgttacataacttacggtaaatggcccgcctggctgaccgcccaacgacccccgcccattgacgtcaataatgacgtatgttcccatagtaacgccaatagggactttccattgacgtcaatgggtggactatttacggtaaactgcccacttggcagtacatcaagtgtatcatatgccaagtacgccccctattgacgtcaatgacggtaaatggcccgcctggcattatgcccagtacatgaccttatgggactttcctacttggcagtacatctacgtattagtcatcgctattaccatgggtcgaggtgagccccacgttctgcttcactctccccatctcccccccctccccacccccaattttgtatttatttattttttaattattttgtgcagcgatgggggcggggggggggggggcgcgcgccaggcggggcggggcggggcgaggggcggggcggggcgaggcggagaggtgcggcggcagccaatcagagcggcgcgctccgaaagtttccttttatggcgaggcggcggcggcggcggccctataaaaagcgaagcgcgcggcgggcgggagtcgctgcgttgccttcgccccgtgccccgctccgcgccgcctcgcgccgcccgccccggctctgactgaccgcgttactcccacaggtgagcgggcgggacggcccttctcctccgggctgtaattagcgcttggtttaatgacggctcgtttcttttctgtggctgcgtgaaagccttaaagggctccgggagggccctttgtgcgggggggagcggctcggggggtgcgtgcgtgtgtgtgtgcgtggggagcgccgcgtgcggcccgcgctgcccggcggctgtgagcgctgcgggcgcggcgcggggctttgtgcgctccgcgtgtgcgcgaggggagcgcggccgggggcggtgccccgcggtgcgggggggctgcgaggggaacaaaggctgcgtgcggggtgtgtgcgtgggggggtgagcagggggtgtgggcgcggcggtcgggctgtaacccccccctgcacccccctccccgagttgctgagcacggcccggcttcgggtgcggggctccgtgcggggcgtggcgcggggctcgccgtgccgggcggggggtggcggcaggtgggggtgccgggcggggcggggccgcctcgggccggggagggctcgggggaggggcgcggcggcccccggagcgccggcgtcctctgagtgctgaaggcttgctgtaggctgtatgctgttgagaatcctgatggagcgggtttttgcctccaactgacccgctcataggattctcaacagtgtatgatgcctgttactagcattcacatggatctagagcctctgctaaccatgttcatgccttcttctttttcctacagctcctgggcaacgtgctggttattgtgaccggtcgctagccaccatggtgagcaagggcgaggagctgttcaccggggtggtgcccatcctggtcgagctggacggcgacgtaaacggccacaagttcagcgtgtccggcgagggcgagggcgatgccacctacggcaagctgaccctgaagttcatctgcaccaccggcaagctgcccgtgccctggcccaccctcgtgaccaccctgacctacggcgtgcagtgcttcagccgctaccccgaccacatgaagcagcacgacttcttcaagtccgccatgcccgaaggctacgtccaggagcgcaccatcttcttcaaggacgacggcaactacaagacccgcgccgaggtgaagttcgagggcgacaccctggtgaaccgcatcgagctgaagggcatcgacttcaaggaggacggcaacatcctggggcacaagctggagtacaactacaacagccacaacgtctatatcatggccgacaagcagaagaacggcatcaaggtgaacttcaagatccgccacaacatcgaggacggcagcgtgcagctcgccgaccactaccagcagaacacccccatcggcgacggccccgtgctgctgcccgacaaccactacctgagcacccagtccgccctgagcaaagaccccaacgagaagcgcgatcacatggtcctgctggagttcgtgaccgccgccgggatcactctcggcatggacgagctgtacaagtaacctgcaggcgccggcgtcctctgagtgctgaaggcttgctgtaggctgtatgctgttgagaatcctgatggagcgggtttttgcctccaactgacccgctcataggattctcaacagtgtatgatgcctgttactagcattcacatggagagctcgctgatcagcctcgactgtgccttctagttgccagccatctgttgtttgcccctcccccgtgccttccttgaccctggaaggtgccactcccactgtcctttcctaataaaatgaggaaattgcatcgcattgtctgagtaggtgtcattctattctggggggtggggtggggcaggacagcaagggggaggattgggaagacaatagcaggcatgctggggatgcggtgggctctatggaagcttgaattcagctgacgtgcctcggaccgctaggaacccctagtgatggagttggccactccctctctgcgcgctcgctcgctcactgaggccgggcgaccaaaggtcgcccgacgcccgggctttgcccgggcggcctcagtgagcgagcgagcgcgcag

SEQ ID NO: 203 - DNA, 2803 bp, Artificial Sequence
  source: /note="Description of Artificial Sequence: Synthetic polynucleotide"
ctgcgcgctcgctcgctcactgaggccgcccgggcgtcgggcgacctttggtcgcccggcctcagtgagcgagcgagcgcgcagagagggagtggccaactccatcactaggggttcctgcggccgcacgcgtgacattgattattgactagttattaatagtaatcaattacggggtcattagttcatagcccatatatggagttccgcgttacataacttacggtaaatggcccgcctggctgaccgcccaacgacccccgcccattgacgtcaataatgacgtatgttcccatagtaacgccaatagggactttccattgacgtcaatgggtggactatttacggtaaactgcccacttggcagtacatcaagtgtatcatatgccaagtacgccccctattgacgtcaatgacggtaaatggcccgcctggcattatgcccagtacatgaccttatgggactttcctacttggcagtacatctacgtattagtcatcgctattaccatgggtcgaggtgagccccacgttctgcttcactctccccatctcccccccctccccacccccaattttgtatttatttattttttaattattttgtgcagcgatgggggcggggggggggggggcgcgcgccaggcggggcggggcggggcgaggggcggggcggggcgaggcggagaggtgcggcggcagccaatcagagcggcgcgctccgaaagtttccttttatggcgaggcggcggcggcggcggccctataaaaagcgaagcgcgcggcgggcgggagtcgctgcgttgccttcgccccgtgccccgctccgcgccgcctcgcgccgcccgccccggctctgactgaccgcgttactcccacaggtgagcgggcgggacggcccttctcctccgggctgtaattagcgcttggtttaatgacggctcgtttcttttctgtggctgcgtgaaagccttaaagggctccgggagggccctttgtgcgggggggagcggctcggggggtgcgtgcgtgtgtgtgtgcgtggggagcgccgcgtgcggcccgcgctgcccggcggctgtgagcgctgcgggcgcggcgcggggctttgtgcgctccgcgtgtgcgcgaggggagcgcggccgggggcggtgccccgcggtgcgggggggctgcgaggggaacaaaggctgcgtgcggggtgtgtgcgtgggggggtgagcagggggtgtgggcgcggcggtcgggctgtaacccccccctgcacccccctccccgagttgctgagcacggcccggcttcgggtgcggggctccgtgcggggcgtggcgcggggctcgccgtgccgggcggggggtggcggcaggtgggggtgccgggcggggcggggccgcctcgggccggggagggctcgggggaggggcgcggcggcccccggagcgccggcgtcctctgagtgctgaaggcttgctgtaggctgtatgctgttgagaatcctgatggagcgggtttttgcctccaactgacccgctcataggattctcaacagtgtatgatgcctgttactagcattcacatggatctagagcctctgctaaccatgttcatgccttcttctttttcctacagctcctgggcaacgtgctggttattgtgaccggtcgctagccaccatggtgagcaagggcgaggagctgttcaccggggtggtgcccatcctggtcgagctggacggcgacgtaaacggccacaagttcagcgtgtccggcgagggcgagggcgatgccacctacggcaagctgaccctgaagttcatctgcaccaccggcaagctgcccgtgccctggcccaccctcgtgaccaccctgacctacggcgtgcagtgcttcagccgctaccccgaccacatgaagcagcacgacttcttcaagtccgccatgcccgaaggctacgtccaggagcgcaccatcttcttcaaggacgacggcaactacaagacccgcgccgaggtgaagttcgagggcgacaccctggtgaaccgcatcgagctgaagggcatcgacttcaaggaggacggcaacatcctggggcacaagctggagtacaactacaacagccacaacgtctatatcatggccgacaagcagaagaacggcatcaaggtgaacttcaagatccgccacaacatcgaggacggcagcgtgcagctcgccgaccactaccagcagaacacccccatcggcgacggccccgtgctgctgcccgacaaccactacctgagcacccagtccgccctgagcaaagaccccaacgagaagcgcgatcacatggtcctgctggagttcgtgaccgccgccgggatcactctcggcatggacgagctgtacaagtaagagctcgctgatcagcctcgactgtgccttctagttgccagccatctgttgtttgcccctcccccgtgccttccttgaccctggaaggtgccactcccactgtcctttcctaataaaatgaggaaattgcatcgcattgtctgagtaggtgtcattctattctggggggtggggtggggcaggacagcaagggggaggattgggaagacaatagcaggcatgctggggatgcggtgggctctatggaagcttgaattcagctgacgtgcctcggaccgctaggaacccctagtgatggagttggccactccctctctgcgcgctcgctcgctcactgaggccgggcgaccaaaggtcgcccgacgcccgggctttgcccgggcggcctcagtgagcgagcgagcgcgcag

SEQ ID NO: 204 - DNA, 3127 bp, Artificial Sequence
  source: /note="Description of Artificial Sequence: Synthetic polynucleotide"
ctgcgcgctcgctcgctcactgaggccgcccgggcgtcgggcgacctttggtcgcccggcctcagtgagcgagcgagcgcgcagagagggagtggccaactccatcactaggggttcctgcggccgcacgcgtgacattgattattgactagttattaatagtaatcaattacggggtcattagttcatagcccatatatggagttccgcgttacataacttacggtaaatggcccgcctggctgaccgcccaacgacccccgcccattgacgtcaataatgacgtatgttcccatagtaacgccaatagggactttccattgacgtcaatgggtggactatttacggtaaactgcccacttggcagtacatcaagtgtatcatatgccaagtacgccccctattgacgtcaatgacggtaaatggcccgcctggcattatgcccagtacatgaccttatgggactttcctacttggcagtacatctacgtattagtcatcgctattaccatgggtcgaggtgagccccacgttctgcttcactctccccatctcccccccctccccacccccaattttgtatttatttattttttaattattttgtgcagcgatgggggcggggggggggggggcgcgcgccaggcggggcggggcggggcgaggggcggggcggggcgaggcggagaggtgcggcggcagccaatcagagcggcgcgctccgaaagtttccttttatggcgaggcggcggcggcggcggccctataaaaagcgaagcgcgcggcgggcgggagtcgctgcgttgccttcgccccgtgccccgctccgcgccgcctcgcgccgcccgccccggctctgactgaccgcgttactcccacaggtgagcgggcgggacggcccttctcctccgggctgtaattagcgcttggtttaatgacggctcgtttcttttctgtggctgcgtgaaagccttaaagggctccgggagggccctttgtgcgggggggagcggctcggggggtgcgtgcgtgtgtgtgtgcgtggggagcgccgcgtgcggcccgcgctgcccggcggctgtgagcgctgcgggcgcggcgcggggctttgtgcgctccgcgtgtgcgcgaggggagcgcggccgggggcggtgccccgcggtgcgggggggctgcgaggggaacaaaggctgcgtgcggggtgtgtgcgtgggggggtgagcagggggtgtgggcgcggcggtcgggctgtaacccccccctgcacccccctccccgagttgctgagcacggcccggcttcgggtgcggggctccgtgcggggcgtggcgcggggctcgccgtgccgggcggggggtggcggcaggtgggggtgccgggcggggcggggccgcctcgggccggggagggctcgggggaggggcgcggcggcccccggagcgccggcggctgtcgaggcgcggcgagccgcagccattgccttttatggtaatcgtgcgagagggcgcagggacttcctttgtcccaaatctgtgcggagccgaaatctgggaggcgccgccgcaccccctctagcgggcgcggggcgaagcggtgcggcgccggcaggaaggaaatgggcggggagggccttcgtgcgtcgccgcgccgccgtccccttctccctctccagcctcggggctgtccgcggggggacggctgccttcgggggggacggggcagggcggggttcggcttctggcgtgtgaccggcggctctagagcctctgctaaccatgttcatgccttcttctttttcctacagctcctgggcaacgtgctggttattgtgaccggtcgctagccaccatggtgagcaagggcgaggagctgttcaccggggtggtgcccatcctggtcgagctggacggcgacgtaaacggccacaagttcagcgtgtccggcgagggcgagggcgatgccacctacggcaagctgaccctgaagttcatctgcaccaccggcaagctgcccgtgccctggcccaccctcgtgaccaccctgacctacggcgtgcagtgcttcagccgctaccccgaccacatgaagcagcacgacttcttcaagtccgccatgcccgaaggctacgtccaggagcgcaccatcttcttcaaggacgacggcaactacaagacccgcgccgaggtgaagttcgagggcgacaccctggtgaaccgcatcgagctgaagggcatcgacttcaaggaggacggcaacatcctggggcacaagctggagtacaactacaacagccacaacgtctatatcatggccgacaagcagaagaacggcatcaaggtgaacttcaagatccgccacaacatcgaggacggcagcgtgcagctcgccgaccactaccagcagaacacccccatcggcgacggccccgtgctgctgcccgacaaccactacctgagcacccagtccgccctgagcaaagaccccaacgagaagcgcgatcacatggtcctgctggagttcgtgaccgccgccgggatcactctcggcatggacgagctgtacaagtaacctgcaggcgccggcgtcctctgagtgctgaaggcttgctgtaggctgtatgctgttgagaatcctgatggagcgggtttttgcctccaactgacccgctcataggattctcaacagtgtatgatgcctgttactagcattcacatggagagctcgctgatcagcctcgactgtgccttctagttgccagccatctgttgtttgcccctcccccgtgccttccttgaccctggaaggtgccactcccactgtcctttcctaataaaatgaggaaattgcatcgcattgtctgagtaggtgtcattctattctggggggtggggtggggcaggacagcaagggggaggattgggaagacaatagcaggcatgctggggatgcggtgggctctatggaagcttgaattcagctgacgtgcctcggaccgctaggaacccctagtgatggagttggccactccctctctgcgcgctcgctcgctcactgaggccgggcgaccaaaggtcgcccgacgcccgggctttgcccgggcggcctcagtgagcgagcgagcgcgcag

SEQ ID NO: 205 - DNA, 2952 bp, Artificial Sequence
  source: /note="Description of Artificial Sequence: Synthetic polynucleotide"
ctgcgcgctcgctcgctcactgaggccgcccgggcgtcgggcgacctttggtcgcccggcctcagtgagcgagcgagcgcgcagagagggagtggccaactccatcactaggggttcctgcggccgcacgcgtgacattgattattgactagttattaatagtaatcaattacggggtcattagttcatagcccatatatggagttccgcgttacataacttacggtaaatggcccgcctggctgaccgcccaacgacccccgcccattgacgtcaataatgacgtatgttcccatagtaacgccaatagggactttccattgacgtcaatgggtggactatttacggtaaactgcccacttggcagtacatcaagtgtatcatatgccaagtacgccccctattgacgtcaatgacggtaaatggcccgcctggcattatgcccagtacatgaccttatgggactttcctacttggcagtacatctacgtattagtcatcgctattaccatgggtcgaggtgagccccacgttctgcttcactctccccatctcccccccctccccacccccaattttgtatttatttattttttaattattttgtgcagcgatgggggcggggggggggggggcgcgcgccaggcggggcggggcggggcgaggggcggggcggggcgaggcggagaggtgcggcggcagccaatcagagcggcgcgctccgaaagtttccttttatggcgaggcggcggcggcggcggccctataaaaagcgaagcgcgcggcgggcgggagtcgctgcgttgccttcgccccgtgccccgctccgcgccgcctcgcgccgcccgccccggctctgactgaccgcgttactcccacaggtgagcgggcgggacggcccttctcctccgggctgtaattagcgcttggtttaatgacggctcgtttcttttctgtggctgcgtgaaagccttaaagggctccgggagggccctttgtgcgggggggagcggctcggggggtgcgtgcgtgtgtgtgtgcgtggggagcgccgcgtgcggcccgcgctgcccggcggctgtgagcgctgcgggcgcggcgcggggctttgtgcgctccgcgtgtgcgcgaggggagcgcggccgggggcggtgccccgcggtgcgggggggctgcgaggggaacaaaggctgcgtgcggggtgtgtgcgtgggggggtgagcagggggtgtgggcgcggcggtcgggctgtaacccccccctgcacccccctccccgagttgctgagcacggcccggcttcgggtgcggggctccgtgcggggcgtggcgcggggctcgccgtgccgggcggggggtggcggcaggtgggggtgccgggcggggcggggccgcctcgggccggggagggctcgggggaggggcgcggcggcccccggagcgccggcgtcctctgagtgctgaaggcttgctgtaggctgtatgctgttgagtctcagagatgcccgggtttttgcctccaactgactcgggattctgagactcaacagtgtatgatgcctgttactagcattcacatggatctagagcctctgctaaccatgttcatgccttcttctttttcctacagctcctgggcaacgtgctggttattgtgaccggtcgctagccaccatggtgagcaagggcgaggagctgttcaccggggtggtgcccatcctggtcgagctggacggcgacgtaaacggccacaagttcagcgtgtccggcgagggcgagggcgatgccacctacggcaagctgaccctgaagttcatctgcaccaccggcaagctgcccgtgccctggcccaccctcgtgaccaccctgacctacggcgtgcagtgcttcagccgctaccccgaccacatgaagcagcacgacttcttcaagtccgccatgcccgaaggctacgtccaggagcgcaccatcttcttcaaggacgacggcaactacaagacccgcgccgaggtgaagttcgagggcgacaccctggtgaaccgcatcgagctgaagggcatcgacttcaaggaggacggcaacatcctggggcacaagctggagtacaactacaacagccacaacgtctatatcatggccgacaagcagaagaacggcatcaaggtgaacttcaagatccgccacaacatcgaggacggcagcgtgcagctcgccgaccactaccagcagaacacccccatcggcgacggccccgtgctgctgcccgacaaccactacctgagcacccagtccgccctgagcaaagaccccaacgagaagcgcgatcacatggtcctgctggagttcgtgaccgccgccgggatcactctcggcatggacgagctgtacaagtaacctgcaggcgccggcgtcctctgagtgctgaaggcttgctgtaggctgtatgctgttgagtctcagagatgcccgggtttttgcctccaactgactcgggattctgagactcaacagtgtatgatgcctgttactagcattcacatggagagctcgctgatcagcctcgactgtgccttctagttgccagccatctgttgtttgcccctcccccgtgccttccttgaccctggaaggtgccactcccactgtcctttcctaataaaatgaggaaattgcatcgcattgtctgagtaggtgtcattctattctggggggtggggtggggcaggacagcaagggggaggattgggaagacaatagcaggcatgctggggatgcggtgggctctatggaagcttgaattcagctgacgtgcctcggaccgctaggaacccctagtgatggagttggccactccctctctgcgcgctcgctcgctcactgaggccgggcgaccaaaggtcgcccgacgcccgggctttgcccgggcggcctcagtgagcgagcgagcgcgcag

SEQ ID NO: 206 - DNA, 2952 bp, Artificial Sequence
  source: /note="Description of Artificial Sequence: Synthetic polynucleotide"
ctgcgcgctcgctcgctcactgaggccgcccgggcgtcgggcgacctttggtcgcccggcctcagtgagcgagcgagcgcgcagagagggagtggccaactccatcactaggggttcctgcggccgcacgcgtgacattgattattgactagttattaatagtaatcaattacggggtcattagttcatagcccatatatggagttccgcgttacataacttacggtaaatggcccgcctggctgaccgcccaacgacccccgcccattgacgtcaataatgacgtatgttcccatagtaacgccaatagggactttccattgacgtcaatgggtggactatttacggtaaactgcccacttggcagtacatcaagtgtatcatatgccaagtacgccccctattgacgtcaatgacggtaaatggcccgcctggcattatgcccagtacatgaccttatgggactttcctacttggcagtacatctacgtattagtcatcgctattaccatgggtcgaggtgagccccacgttctgcttcactctccccatctcccccccctccccacccccaattttgtatttatttattttttaattattttgtgcagcgatgggggcggggggggggggggcgcgcgccaggcggggcggggcggggcgaggggcggggcggggcgaggcggagaggtgcggcggcagccaatcagagcggcgcgctccgaaagtttccttttatggcgaggcggcggcggcggcggccctataaaaagcgaagcgcgcggcgggcgggagtcgctgcgttgccttcgccccgtgccccgctccgcgccgcctcgcgccgcccgccccggctctgactgaccgcgttactcccacaggtgagcgggcgggacggcccttctcctccgggctgtaattagcgcttggtttaatgacggctcgtttcttttctgtggctgcgtgaaagccttaaagggctccgggagggccctttgtgcgggggggagcggctcggggggtgcgtgcgtgtgtgtgtgcgtggggagcgccgcgtgcggcccgcgctgcccggcggctgtgagcgctgcgggcgcggcgcggggctttgtgcgctccgcgtgtgcgcgaggggagcgcggccgggggcggtgccccgcggtgcgggggggctgcgaggggaacaaaggctgcgtgcggggtgtgtgcgtgggggggtgagcagggggtgtgggcgcggcggtcgggctgtaacccccccctgcacccccctccccgagttgctgagcacggcccggcttcgggtgcggggctccgtgcggggcgtggcgcggggctcgccgtgccgggcggggggtggcggcaggtgggggtgccgggcggggcggggccgcctcgggccggggagggctcgggggaggggcgcggcggcccccggagcgccggcgtcctctgagtgctgaaggcttgctgtaggctgtatgctgttgagtctcagagatgcccgggtttttgcctccaactgactcgggattctgagattcaacagtgtatgatgcctgttactagcattcacatggatctagagcctctgctaaccatgttcatgccttcttctttttcctacagctcctgggcaacgtgctggttattgtgaccggtcgctagccaccatggtgagcaagggcgaggagctgttcaccggggtggtgcccatcctggtcgagctggacggcgacgtaaacggccacaagttcagcgtgtccggcgagggcgagggcgatgccacctacggcaagctgaccctgaagttcatctgcaccaccggcaagctgcccgtgccctggcccaccctcgtgaccaccctgacctacggcgtgcagtgcttcagccgctaccccgaccacatgaagcagcacgacttcttcaagtccgccatgcccgaaggctacgtccaggagcgcaccatcttcttcaaggacgacggcaactacaagacccgcgccgaggtgaagttcgagggcgacaccctggtgaaccgcatcgagctgaagggcatcgacttcaaggaggacggcaacatcctggggcacaagctggagtacaactacaacagccacaacgtctatatcatggccgacaagcagaagaacggcatcaaggtgaacttcaagatccgccacaacatcgaggacggcagcgtgcagctcgccgaccactaccagcagaacacccccatcggcgacggccccgtgctgctgcccgacaaccactacctgagcacccagtccgccctgagcaaagaccccaacgagaagcgcgatcacatggtcctgctggagttcgtgaccgccgccgggatcactctcggcatggacgagctgtacaagtaacctgcaggcgccggcgtcctctgagtgctgaaggcttgctgtaggctgtatgctgttgagtctcagagatgcccgggtttttgcctccaactgactcgggattctgagattcaacagtgtatgatgcctgttactagcattcacatggagagctcgctgatcagcctcgactgtgccttctagttgccagccatctgttgtttgcccctcccccgtgccttccttgaccctggaaggtgccactcccactgtcctttcctaataaaatgaggaaattgcatcgcattgtctgagtaggtgtcattctattctggggggtggggtggggcaggacagcaagggggaggattgggaagacaatagcaggcatgctggggatgcggtgggctctatggaagcttgaattcagctgacgtgcctcggaccgctaggaacccctagtgatggagttggccactccctctctgcgcgctcgctcgctcactgaggccgggcgaccaaaggtcgcccgacgcccgggctttgcccgggcggcctcagtgagcgagcgagcgcgcag

SEQ ID NO: 207 - DNA, 2952 bp, Artificial Sequence
  source: /note="Description of Artificial Sequence: Synthetic polynucleotide"
ctgcgcgctcgctcgctcactgaggccgcccgggcgtcgggcgacctttggtcgcccggcctcagtgagcgagcgagcgcgcagagagggagtggccaactccatcactaggggttcctgcggccgcacgcgtgacattgattattgactagttattaatagtaatcaattacggggtcattagttcatagcccatatatggagttccgcgttacataacttacggtaaatggcccgcctggctgaccgcccaacgacccccgcccattgacgtcaataatgacgtatgttcccatagtaacgccaatagggactttccattgacgtcaatgggtggactatttacggtaaactgcccacttggcagtacatcaagtgtatcatatgccaagtacgccccctattgacgtcaatgacggtaaatggcccgcctggcattatgcccagtacatgaccttatgggactttcctacttggcagtacatctacgtattagtcatcgctattaccatgggtcgaggtgagccccacgttctgcttcactctccccatctcccccccctccccacccccaattttgtatttatttattttttaattattttgtgcagcgatgggggcggggggggggggggcgcgcgccaggcggggcggggcggggcgaggggcggggcggggcgaggcggagaggtgcggcggcagccaatcagagcggcgcgctccgaaagtttccttttatggcgaggcggcggcggcggcggccctataaaaagcgaagcgcgcggcgggcgggagtcgctgcgttgccttcgccccgtgccccgctccgcgccgcctcgcgccgcccgccccggctctgactgaccgcgttactcccacaggtgagcgggcgggacggcccttctcctccgggctgtaattagcgcttggtttaatgacggctcgtttcttttctgtggctgcgtgaaagccttaaagggctccgggagggccctttgtgcgggggggagcggctcggggggtgcgtgcgtgtgtgtgtgcgtggggagcgccgcgtgcggcccgcgctgcccggcggctgtgagcgctgcgggcgcggcgcggggctttgtgcgctccgcgtgtgcgcgaggggagcgcggccgggggcggtgccccgcggtgcgggggggctgcgaggggaacaaaggctgcgtgcggggtgtgtgcgtgggggggtgagcagggggtgtgggcgcggcggtcgggctgtaacccccccctgcacccccctccccgagttgctgagcacggcccggcttcgggtgcggggctccgtgcggggcgtggcgcggggctcgccgtgccgggcggggggtggcggcaggtgggggtgccgggcggggcggggccgcctcgggccggggagggctcgggggaggggcgcggcggcccccggagcgccggcgtcctctgagtgctgaaggcttgctgtaggctgtatgctgttgagtctcagagatgcccgggtttttgcctccaactgactcgggatcctgagattcaacagtgtatgatgcctgttactagcattcacatggatctagagcctctgctaaccatgttcatgccttcttctttttcctacagctcctgggcaacgtgctggttattgtgaccggtcgctagccaccatggtgagcaagggcgaggagctgttcaccggggtggtgcccatcctggtcgagctggacggcgacgtaaacggccacaagttcagcgtgtccggcgagggcgagggcgatgccacctacggcaagctgaccctgaagttcatctgcaccaccggcaagctgcccgtgccctggcccaccctcgtgaccaccctgacctacggcgtgcagtgcttcagccgctaccccgaccacatgaagcagcacgacttcttcaagtccgccatgcccgaaggctacgtccaggagcgcaccatcttcttcaaggacgacggcaactacaagacccgcgccgaggtgaagttcgagggcgacaccctggtgaaccgcatcgagctgaagggcatcgacttcaaggaggacggcaacatcctggggcacaagctggagtacaactacaacagccacaacgtctatatcatggccgacaagcagaagaacggcatcaaggtgaacttcaagatccgccacaacatcgaggacggcagcgtgcagctcgccgaccactaccagcagaacacccccatcggcgacggccccgtgctgctgcccgacaaccactacctgagcacccagtccgccctgagcaaagaccccaacgagaagcgcgatcacatggtcctgctggagttcgtgaccgccgccgggatcactctcggcatggacgagctgtacaagtaacctgcaggcgccggcgtcctctgagtgctgaaggcttgctgtaggctgtatgctgttgagtctcagagatgcccgggtttttgcctccaactgactcgggatcctgagattcaacagtgtatgatgcctgttactagcattcacatggagagctcgctgatcagcctcgactgtgccttctagttgccagccatctgttgtttgcccctcccccgtgccttccttgaccctggaaggtgccactcccactgtcctttcctaataaaatgaggaaattgcatcgcattgtctgagtaggtgtcattctattctggggggtggggtggggcaggacagcaagggggaggattgggaagacaatagcaggcatgctggggatgcggtgggctctatggaagcttgaattcagctgacgtgcctcggaccgctaggaacccctagtgatggagttggccactccctctctgcgcgctcgctcgctcactgaggccgggcgaccaaaggtcgcccgacgcccgggctttgcccgggcggcctcagtgagcgagcgagcgcgcag

SEQ ID NO: 208 - DNA, 2952 bp, Artificial Sequence
  source: /note="Description of Artificial Sequence: Synthetic polynucleotide"
ctgcgcgctcgctcgctcactgaggccgcccgggcgtcgggcgacctttggtcgcccggcctcagtgagcgagcgagcgcgcagagagggagtggccaactccatcactaggggttcctgcggccgcacgcgtgacattgattattgactagttattaatagtaatcaattacggggtcattagttcatagcccatatatggagttccgcgttacataacttacggtaaatggcccgcctggctgaccgcccaacgacccccgcccattgacgtcaataatgacgtatgttcccatagtaacgccaatagggactttccattgacgtcaatgggtggactatttacggtaaactgcccacttggcagtacatcaagtgtatcatatgccaagtacgccccctattgacgtcaatgacggtaaatggcccgcctggcattatgcccagtacatgaccttatgggactttcctacttggcagtacatctacgtattagtcatcgctattaccatgggtcgaggtgagccccacgttctgcttcactctccccatctcccccccctccccacccccaattttgtatttatttattttttaattattttgtgcagcgatgggggcggggggggggggggcgcgcgccaggcggggcggggcggggcgaggggcggggcggggcgaggcggagaggtgcggcggcagccaatcagagcggcgcgctccgaaagtttccttttatggcgaggcggcggcggcggcggccctataaaaagcgaagcgcgcggcgggcgggagtcgctgcgttgccttcgccccgtgccccgctccgcgccgcctcgcgccgcccgccccggctctgactgaccgcgttactcccacaggtgagcgggcgggacggcccttctcctccgggctgtaattagcgcttggtttaatgacggctcgtttcttttctgtggctgcgtgaaagccttaaagggctccgggagggccctttgtgcgggggggagcggctcggggggtgcgtgcgtgtgtgtgtgcgtggggagcgccgcgtgcggcccgcgctgcccggcggctgtgagcgctgcgggcgcggcgcggggctttgtgcgctccgcgtgtgcgcgaggggagcgcggccgggggcggtgccccgcggtgcgggggggctgcgaggggaacaaaggctgcgtgcggggtgtgtgcgtgggggggtgagcagggggtgtgggcgcggcggtcgggctgtaacccccccctgcacccccctccccgagttgctgagcacggcccggcttcgggtgcggggctccgtgcggggcgtggcgcggggctcgccgtgccgggcggggggtggcggcaggtgggggtgccgggcggggcggggccgcctcgggccggggagggctcgggggaggggcgcggcggcccccggagcgccggcgtcctctgagtgctgaaggcttgctgtaggctgtatgctgttgagtctcagagatgcccggaagtttgcctccaactctttcgggatcctgagattcaacagtgtatgatgcctgttactagcattcacatggatctagagcctctgctaaccatgttcatgccttcttctttttcctacagctcctgggcaacgtgctggttattgtgaccggtcgctagccaccatggtgagcaagggcgaggagctgttcaccggggtggtgcccatcctggtcgagctggacggcgacgtaaacggccacaagttcagcgtgtccggcgagggcgagggcgatgccacctacggcaagctgaccctgaagttcatctgcaccaccggcaagctgcccgtgccctggcccaccctcgtgaccaccctgacctacggcgtgcagtgcttcagccgctaccccgaccacatgaagcagcacgacttcttcaagtccgccatgcccgaaggctacgtccaggagcgcaccatcttcttcaaggacgacggcaactacaagacccgcgccgaggtgaagttcgagggcgacaccctggtgaaccgcatcgagctgaagggcatcgacttcaaggaggacggcaacatcctggggcacaagctggagtacaactacaacagccacaacgtctatatcatggccgacaagcagaagaacggcatcaaggtgaacttcaagatccgccacaacatcgaggacggcagcgtgcagctcgccgaccactaccagcagaacacccccatcggcgacggccccgtgctgctgcccgacaaccactacctgagcacccagtccgccctgagcaaagaccccaacgagaagcgcgatcacatggtcctgctggagttcgtgaccgccgccgggatcactctcggcatggacgagctgtacaagtaacctgcaggcgccggcgtcctctgagtgctgaaggcttgctgtaggctgtatgctgttgagtctcagagatgcccggaagtttgcctccaactctttcgggatcctgagattcaacagtgtatgatgcctgttactagcattcacatggagagctcgctgatcagcctcgactgtgccttctagttgccagccatctgttgtttgcccctcccccgtgccttccttgaccctggaaggtgccactcccactgtcctttcctaataaaatgaggaaattgcatcgcattgtctgagtaggtgtcattctattctggggggtggggtggggcaggacagcaagggggaggattgggaagacaatagcaggcatgctggggatgcggtgggctctatggaagcttgaattcagctgacgtgcctcggaccgctaggaacccctagtgatggagttggccactccctctctgcgcgctcgctcgctcactgaggccgggcgaccaaaggtcgcccgacgcccgggctttgcccgggcggcctcagtgagcgagcgagcgcgcag

SEQ ID NO: 209 - DNA, 2952 bp, Artificial Sequence
  source: /note="Description of Artificial Sequence: Synthetic polynucleotide"
ctgcgcgctcgctcgctcactgaggccgcccgggcgtcgggcgacctttggtcgcccggcctcagtgagcgagcgagcgcgcagagagggagtggccaactccatcactaggggttcctgcggccgcacgcgtgacattgattattgactagttattaatagtaatcaattacggggtcattagttcatagcccatatatggagttccgcgttacataacttacggtaaatggcccgcctggctgaccgcccaacgacccccgcccattgacgtcaataatgacgtatgttcccatagtaacgccaatagggactttccattgacgtcaatgggtggactatttacggtaaactgcccacttggcagtacatcaagtgtatcatatgccaagtacgccccctattgacgtcaatgacggtaaatggcccgcctggcattatgcccagtacatgaccttatgggactttcctacttggcagtacatctacgtattagtcatcgctattaccatgggtcgaggtgagccccacgttctgcttcactctccccatctcccccccctccccacccccaattttgtatttatttattttttaattattttgtgcagcgatgggggcggggggggggggggcgcgcgccaggcggggcggggcggggcgaggggcggggcggggcgaggcggagaggtgcggcggcagccaatcagagcggcgcgctccgaaagtttccttttatggcgaggcggcggcggcggcggccctataaaaagcgaagcgcgcggcgggcgggagtcgctgcgttgccttcgccccgtgccccgctccgcgccgcctcgcgccgcccgccccggctctgactgaccgcgttactcccacaggtgagcgggcgggacggcccttctcctccgggctgtaattagcgcttggtttaatgacggctcgtttcttttctgtggctgcgtgaaagccttaaagggctccgggagggccctttgtgcgggggggagcggctcggggggtgcgtgcgtgtgtgtgtgcgtggggagcgccgcgtgcggcccgcgctgcccggcggctgtgagcgctgcgggcgcggcgcggggctttgtgcgctccgcgtgtgcgcgaggggagcgcggccgggggcggtgccccgcggtgcgggggggctgcgaggggaacaaaggctgcgtgcggggtgtgtgcgtgggggggtgagcagggggtgtgggcgcggcggtcgggctgtaacccccccctgcacccccctccccgagttgctgagcacggcccggcttcgggtgcggggctccgtgcggggcgtggcgcggggctcgccgtgccgggcggggggtggcggcaggtgggggtgccgggcggggcggggccgcctcgggccggggagggctcgggggaggggcgcggcggcccccggagcgccggcgtcctctgagtgctgaaggcttgctgtaggctgtatgctgttctcgaagtgcttctgccgggtttttgcctccaactgactcggcgaatacttcgagaacagtgtatgatgcctgttactagcattcacatggatctagagcctctgctaaccatgttcatgccttcttctttttcctacagctcctgggcaacgtgctggttattgtgaccggtcgctagccaccatggtgagcaagggcgaggagctgttcaccggggtggtgcccatcctggtcgagctggacggcgacgtaaacggccacaagttcagcgtgtccggcgagggcgagggcgatgccacctacggcaagctgaccctgaagttcatctgcaccaccggcaagctgcccgtgccctggcccaccctcgtgaccaccctgacctacggcgtgcagtgcttcagccgctaccccgaccacatgaagcagcacgacttcttcaagtccgccatgcccgaaggctacgtccaggagcgcaccatcttcttcaaggacgacggcaactacaagacccgcgccgaggtgaagttcgagggcgacaccctggtgaaccgcatcgagctgaagggcatcgacttcaaggaggacggcaacatcctggggcacaagctggagtacaactacaacagccacaacgtctatatcatggccgacaagcagaagaacggcatcaaggtgaacttcaagatccgccacaacatcgaggacggcagcgtgcagctcgccgaccactaccagcagaacacccccatcggcgacggccccgtgctgctgcccgacaaccactacctgagcacccagtccgccctgagcaaagaccccaacgagaagcgcgatcacatggtcctgctggagttcgtgaccgccgccgggatcactctcggcatggacgagctgtacaagtaacctgcaggcgccggcgtcctctgagtgctgaaggcttgctgtaggctgtatgctgttctcgaagtgcttctgccgggtttttgcctccaactgactcggcgaatacttcgagaacagtgtatgatgcctgttactagcattcacatggagagctcgctgatcagcctcgactgtgccttctagttgccagccatctgttgtttgcccctcccccgtgccttccttgaccctggaaggtgccactcccactgtcctttcctaataaaatgaggaaattgcatcgcattgtctgagtaggtgtcattctattctggggggtggggtggggcaggacagcaagggggaggattgggaagacaatagcaggcatgctggggatgcggtgggctctatggaagcttgaattcagctgacgtgcctcggaccgctaggaacccctagtgatggagttggccactccctctctgcgcgctcgctcgctcactgaggccgggcgaccaaaggtcgcccgacgcccgggctttgcccgggcggcctcagtgagcgagcgagcgcgcag

SEQ ID NO: 210 - DNA, 2952 bp, Artificial Sequence
  source: /note="Description of Artificial Sequence: Synthetic polynucleotide"
ctgcgcgctcgctcgctcactgaggccgcccgggcgtcgggcgacctttggtcgcccggcctcagtgagcgagcgagcgcgcagagagggagtggccaactccatcactaggggttcctgcggccgcacgcgtgacattgattattgactagttattaatagtaatcaattacggggtcattagttcatagcccatatatggagttccgcgttacataacttacggtaaatggcccgcctggctgaccgcccaacgacccccgcccattgacgtcaataatgacgtatgttcccatagtaacgccaatagggactttccattgacgtcaatgggtggactatttacggtaaactgcccacttggcagtacatcaagtgtatcatatgccaagtacgccccctattgacgtcaatgacggtaaatggcccgcctggcattatgcccagtacatgaccttatgggactttcctacttggcagtacatctacgtattagtcatcgctattaccatgggtcgaggtgagccccacgttctgcttcactctccccatctcccccccctccccacccccaattttgtatttatttattttttaattattttgtgcagcgatgggggcggggggggggggggcgcgcgccaggcggggcggggcggggcgaggggcggggcggggcgaggcggagaggtgcggcggcagccaatcagagcggcgcgctccgaaagtttccttttatggcgaggcggcggcggcggcggccctataaaaagcgaagcgcgcggcgggcgggagtcgctgcgttgccttcgccccgtgccccgctccgcgccgcctcgcgccgcccgccccggctctgactgaccgcgttactcccacaggtgagcgggcgggacggcccttctcctccgggctgtaattagcgcttggtttaatgacggctcgtttcttttctgtggctgcgtgaaagccttaaagggctccgggagggccctttgtgcgggggggagcggctcggggggtgcgtgcgtgtgtgtgtgcgtggggagcgccgcgtgcggcccgcgctgcccggcggctgtgagcgctgcgggcgcggcgcggggctttgtgcgctccgcgtgtgcgcgaggggagcgcggccgggggcggtgccccgcggtgcgggggggctgcgaggggaacaaaggctgcgtgcggggtgtgtgcgtgggggggtgagcagggggtgtgggcgcggcggtcgggctgtaacccccccctgcacccccctccccgagttgctgagcacggcccggcttcgggtgcggggctccgtgcggggcgtggcgcggggctcgccgtgccgggcggggggtggcggcaggtgggggtgccgggcggggcggggccgcctcgggccggggagggctcgggggaggggcgcggcggcccccggagcgccggcgtcctctgagtgctgaaggcttgctgtaggctgtatgctgttctccaccttgaccacgcgtgtttttgcctccaactgacatgtgggtaaggtggagaacagtgtatgatgcctgttactagcattcacatggatctagagcctctgctaaccatgttcatgccttcttctttttcctacagctcctgggcaacgtgctggttattgtgaccggtcgctagccaccatggtgagcaagggcgaggagctgttcaccggggtggtgcccatcctggtcgagctggacggcgacgtaaacggccacaagttcagcgtgtccggcgagggcgagggcgatgccacctacggcaagctgaccctgaagttcatctgcaccaccggcaagctgcccgtgccctggcccaccctcgtgaccaccctgacctacggcgtgcagtgcttcagccgctaccccgaccacatgaagcagcacgacttcttcaagtccgccatgcccgaaggctacgtccaggagcgcaccatcttcttcaaggacgacggcaactacaagacccgcgccgaggtgaagttcgagggcgacaccctggtgaaccgcatcgagctgaagggcatcgacttcaaggaggacggcaacatcctggggcacaagctggagtacaactacaacagccacaacgtctatatcatggccgacaagcagaagaacggcatcaaggtgaacttcaagatccgccacaacatcgaggacggcagcgtgcagctcgccgaccactaccagcagaacacccccatcggcgacggccccgtgctgctgcccgacaaccactacctgagcacccagtccgccctgagcaaagaccccaacgagaagcgcgatcacatggtcctgctggagttcgtgaccgccgccgggatcactctcggcatggacgagctgtacaagtaacctgcaggcgccggcgtcctctgagtgctgaaggcttgctgtaggctgtatgctgttctccaccttgaccacgcgtgtttttgcctccaactgacatgtgggtaaggtggagaacagtgtatgatgcctgttactagcattcacatggagagctcgctgatcagcctcgactgtgccttctagttgccagccatctgttgtttgcccctcccccgtgccttccttgaccctggaaggtgccactcccactgtcctttcctaataaaatgaggaaattgcatcgcattgtctgagtaggtgtcattctattctggggggtggggtggggcaggacagcaagggggaggattgggaagacaatagcaggcatgctggggatgcggtgggctctatggaagcttgaattcagctgacgtgcctcggaccgctaggaacccctagtgatggagttggccactccctctctgcgcgctcgctcgctcactgaggccgggcgaccaaaggtcgcccgacgcccgggctttgcccgggcggcctcagtgagcgagcgagcgcgcag

SEQ ID NO: 211 - DNA, 2952 bp, Artificial Sequence
  source: /note="Description of Artificial Sequence: Synthetic polynucleotide"
ctgcgcgctcgctcgctcactgaggccgcccgggcgtcgggcgacctttggtcgcccggcctcagtgagcgagcgagcgcgcagagagggagtggccaactccatcactaggggttcctgcggccgcacgcgtgacattgattattgactagttattaatagtaatcaattacggggtcattagttcatagcccatatatggagttccgcgttacataacttacggtaaatggcccgcctggctgaccgcccaacgacccccgcccattgacgtcaataatgacgtatgttcccatagtaacgccaatagggactttccattgacgtcaatgggtggactatttacggtaaactgcccacttggcagtacatcaagtgtatcatatgccaagtacgccccctattgacgtcaatgacggtaaatggcccgcctggcattatgcccagtacatgaccttatgggactttcctacttggcagtacatctacgtattagtcatcgctattaccatgggtcgaggtgagccccacgttctgcttcactctccccatctcccccccctccccacccccaattttgtatttatttattttttaattattttgtgcagcgatgggggcggggggggggggggcgcgcgccaggcggggcggggcggggcgaggggcggggcggggcgaggcggagaggtgcggcggcagccaatcagagcggcgcgctccgaaagtttccttttatggcgaggcggcggcggcggcggccctataaaaagcgaagcgcgcggcgggcgggagtcgctgcgttgccttcgccccgtgccccgctccgcgccgcctcgcgccgcccgccccggctctgactgaccgcgttactcccacaggtgagcgggcgggacggcccttctcctccgggctgtaattagcgcttggtttaatgacggctcgtttcttttctgtggctgcgtgaaagccttaaagggctccgggagggccctttgtgcgggggggagcggctcggggggtgcgtgcgtgtgtgtgtgcgtggggagcgccgcgtgcggcccgcgctgcccggcggctgtgagcgctgcgggcgcggcgcggggctttgtgcgctccgcgtgtgcgcgaggggagcgcggccgggggcggtgccccgcggtgcgggggggctgcgaggggaacaaaggctgcgtgcggggtgtgtgcgtgggggggtgagcagggggtgtgggcgcggcggtcgggctgtaacccccccctgcacccccctccccgagttgctgagcacggcccggcttcgggtgcggggctccgtgcggggcgtggcgcggggctcgccgtgccgggcggggggtggcggcaggtgggggtgccgggcggggcggggccgcctcgggccggggagggctcgggggaggggcgcggcggcccccggagcgccggcgtcctctgagtgctgaaggcttgctgtaggctgtatgctgatactgtcatagtagtaccaggtttttgcctccaactgacctggtctatatgacagtatcagtgtatgatgcctgttactagcattcacatggatctagagcctctgctaaccatgttcatgccttcttctttttcctacagctcctgggcaacgtgctggttattgtgaccggtcgctagccaccatggtgagcaagggcgaggagctgttcaccggggtggtgcccatcctggtcgagctggacggcgacgtaaacggccacaagttcagcgtgtccggcgagggcgagggcgatgccacctacggcaagctgaccctgaagttcatctgcaccaccggcaagctgcccgtgccctggcccaccctcgtgaccaccctgacctacggcgtgcagtgcttcagccgctaccccgaccacatgaagcagcacgacttcttcaagtccgccatgcccgaaggctacgtccaggagcgcaccatcttcttcaaggacgacggcaactacaagacccgcgccgaggtgaagttcgagggcgacaccctggtgaaccgcatcgagctgaagggcatcgacttcaaggaggacggcaacatcctggggcacaagctggagtacaactacaacagccacaacgtctatatcatggccgacaagcagaagaacggcatcaaggtgaacttcaagatccgccacaacatcgaggacggcagcgtgcagctcgccgaccactaccagcagaacacccccatcggcgacggccccgtgctgctgcccgacaaccactacctgagcacccagtccgccctgagcaaagaccccaacgagaagcgcgatcacatggtcctgctggagttcgtgaccgccgccgggatcactctcggcatggacgagctgtacaagtaacctgcaggcgccggcgtcctctgagtgctgaaggcttgctgtaggctgtatgctgatactgtcatagtagtaccaggtttttgcctccaactgacctggtctatatgacagtatcagtgtatgatgcctgttactagcattcacatggagagctcgctgatcagcctcgactgtgccttctagttgccagccatctgttgtttgcccctcccccgtgccttccttgaccctggaaggtgccactcccactgtcctttcctaataaaatgaggaaattgcatcgcattgtctgagtaggtgtcattctattctggggggtggggtggggcaggacagcaagggggaggattgggaagacaatagcaggcatgctggggatgcggtgggctctatggaagcttgaattcagctgacgtgcctcggaccgctaggaacccctagtgatggagttggccactccctctctgcgcgctcgctcgctcactgaggccgggcgaccaaaggtcgcccgacgcccgggctttgcccgggcggcctcagtgagcgagcgagcgcgcag

SEQ ID NO: 212 - DNA, 2952 bp, Artificial Sequence
  source: /note="Description of Artificial Sequence: Synthetic polynucleotide"
ctgcgcgctcgctcgctcactgaggccgcccgggcgtcgggcgacctttggtcgcccggcctcagtgagcgagcgagcgcgcagagagggagtggccaactccatcactaggggttcctgcggccgcacgcgtgacattgattattgactagttattaatagtaatcaattacggggtcattagttcatagcccatatatggagttccgcgttacataacttacggtaaatggcccgcctggctgaccgcccaacgacccccgcccattgacgtcaataatgacgtatgttcccatagtaacgccaatagggactttccattgacgtcaatgggtggactatttacggtaaactgcccacttggcagtacatcaagtgtatcatatgccaagtacgccccctattgacgtcaatgacggtaaatggcccgcctggcattatgcccagtacatgaccttatgggactttcctacttggcagtacatctacgtattagtcatcgctattaccatgggtcgaggtgagccccacgttctgcttcactctccccatctcccccccctccccacccccaattttgtatttatttattttttaattattttgtgcagcgatgggggcggggggggggggggcgcgcgccaggcggggcggggcggggcgaggggcggggcggggcgaggcggagaggtgcggcggcagccaatcagagcggcgcgctccgaaagtttccttttatggcgaggcggcggcggcggcggccctataaaaagcgaagcgcgcggcgggcgggagtcgctgcgttgccttcgccccgtgccccgctccgcgccgcctcgcgccgcccgccccggctctgactgaccgcgttactcccacaggtgagcgggcgggacggcccttctcctccgggctgtaattagcgcttggtttaatgacggctcgtttcttttctgtggctgcgtgaaagccttaaagggctccgggagggccctttgtgcgggggggagcggctcggggggtgcgtgcgtgtgtgtgtgcgtggggagcgccgcgtgcggcccgcgctgcccggcggctgtgagcgctgcgggcgcggcgcggggctttgtgcgctccgcgtgtgcgcgaggggagcgcggccgggggcggtgccccgcggtgcgggggggctgcgaggggaacaaaggctgcgtgcggggtgtgtgcgtgggggggtgagcagggggtgtgggcgcggcggtcgggctgtaacccccccctgcacccccctccccgagttgctgagcacggcccggcttcgggtgcggggctccgtgcggggcgtggcgcggggctcgccgtgccgggcggggggtggcggcaggtgggggtgccgggcggggcggggccgcctcgggccggggagggctcgggggaggggcgcggcggcccccggagcgccggcgtcctctgagtgctgaaggcttgctgtaggctgtatgctgtagtcggaggtgatgtcgggggtttttgcctccaactgactcctgcataccttcgattacagtgtatgatgcctgttactagcattcacatggatctagagcctctgctaaccatgttcatgccttcttctttttcctacagctcctgggcaacgtgctggttattgtgaccggtcgctagccaccatggtgagcaagggcgaggagctgttcaccggggtggtgcccatcctggtcgagctggacggcgacgtaaacggccacaagttcagcgtgtccggcgagggcgagggcgatgccacctacggcaagctgaccctgaagttcatctgcaccaccggcaagctgcccgtgccctggcccaccctcgtgaccaccctgacctacggcgtgcagtgcttcagccgctaccccgaccacatgaagcagcacgacttcttcaagtccgccatgcccgaaggctacgtccaggagcgcaccatcttcttcaaggacgacggcaactacaagacccgcgccgaggtgaagttcgagggcgacaccctggtgaaccgcatcgagctgaagggcatcgacttcaaggaggacggcaacatcctggggcacaagctggagtacaactacaacagccacaacgtctatatcatggccgacaagcagaagaacggcatcaaggtgaacttcaagatccgccacaacatcgaggacggcagcgtgcagctcgccgaccactaccagcagaacacccccatcggcgacggccccgtgctgctgcccgacaaccactacctgagcacccagtccgccctgagcaaagaccccaacgagaagcgcgatcacatggtcctgctggagttcgtgaccgccgccgggatcactctcggcatggacgagctgtacaagtaacctgcaggcgccggcgtcctctgagtgctgaaggcttgctgtaggctgtatgctgtagtcggaggtgatgtcgggggtttttgcctccaactgactcctgcataccttcgattacagtgtatgatgcctgttactagcattcacatggagagctcgctgatcagcctcgactgtgccttctagttgccagccatctgttgtttgcccctcccccgtgccttccttgaccctggaaggtgccactcccactgtcctttcctaataaaatgaggaaattgcatcgcattgtctgagtaggtgtcattctattctggggggtggggtggggcaggacagcaagggggaggattgggaagacaatagcaggcatgctggggatgcggtgggctctatggaagcttgaattcagctgacgtgcctcggaccgctaggaacccctagtgatggagttggccactccctctctgcgcgctcgctcgctcactgaggccgggcgaccaaaggtcgcccgacgcccgggctttgcccgggcggcctcagtgagcgagcgagcgcgcag

SEQ ID NO: 213 - DNA, 2940 bp, Artificial Sequence
  source: /note="Description of Artificial Sequence: Synthetic polynucleotide"
ctgcgcgctcgctcgctcactgaggccgcccgggcgtcgggcgacctttggtcgcccggcctcagtgagcgagcgagcgcgcagagagggagtggccaactccatcactaggggttcctgcggccgcacgcgtgacattgattattgactagttattaatagtaatcaattacggggtcattagttcatagcccatatatggagttccgcgttacataacttacggtaaatggcccgcctggctgaccgcccaacgacccccgcccattgacgtcaataatgacgtatgttcccatagtaacgccaatagggactttccattgacgtcaatgggtggactatttacggtaaactgcccacttggcagtacatcaagtgtatcatatgccaagtacgccccctattgacgtcaatgacggtaaatggcccgcctggcattatgcccagtacatgaccttatgggactttcctacttggcagtacatctacgtattagtcatcgctattaccatgggtcgaggtgagccccacgttctgcttcactctccccatctcccccccctccccacccccaattttgtatttatttattttttaattattttgtgcagcgatgggggcggggggggggggggcgcgcgccaggcggggcggggcggggcgaggggcggggcggggcgaggcggagaggtgcggcggcagccaatcagagcggcgcgctccgaaagtttccttttatggcgaggcggcggcggcggcggccctataaaaagcgaagcgcgcggcgggcgggagtcgctgcgttgccttcgccccgtgccccgctccgcgccgcctcgcgccgcccgccccggctctgactgaccgcgttactcccacaggtgagcgggcgggacggcccttctcctccgggctgtaattagcgcttggtttaatgacggctcgtttcttttctgtggctgcgtgaaagccttaaagggctccgggagggccctttgtgcgggggggagcggctcggggggtgcgtgcgtgtgtgtgtgcgtggggagcgccgcgtgcggcccgcgctgcccggcggctgtgagcgctgcgggcgcggcgcggggctttgtgcgctccgcgtgtgcgcgaggggagcgcggccgggggcggtgccccgcggtgcgggggggctgcgaggggaacaaaggctgcgtgcggggtgtgtgcgtgggggggtgagcagggggtgtgggcgcggcggtcgggctgtaacccccccctgcacccccctccccgagttgctgagcacggcccggcttcgggtgcggggctccgtgcggggcgtggcgcggggctcgccgtgccgggcggggggtggcggcaggtgggggtgccgggcggggcggggccgcctcgggccggggagggctcgggggaggggcgcggcggcccccggagcgccggcgcatagctcttatgatagcaatgtcagcagtgcctttgagaatcctgatggagcgggttaagattctaaaattatcacgctccatgagtgattctcagaagtaaggttgaccatactctacagttgtgtctagagcctctgctaaccatgttcatgccttcttctttttcctacagctcctgggcaacgtgctggttattgtgaccggtcgctagccaccatggtgagcaagggcgaggagctgttcaccggggtggtgcccatcctggtcgagctggacggcgacgtaaacggccacaagttcagcgtgtccggcgagggcgagggcgatgccacctacggcaagctgaccctgaagttcatctgcaccaccggcaagctgcccgtgccctggcccaccctcgtgaccaccctgacctacggcgtgcagtgcttcagccgctaccccgaccacatgaagcagcacgacttcttcaagtccgccatgcccgaaggctacgtccaggagcgcaccatcttcttcaaggacgacggcaactacaagacccgcgccgaggtgaagttcgagggcgacaccctggtgaaccgcatcgagctgaagggcatcgacttcaaggaggacggcaacatcctggggcacaagctggagtacaactacaacagccacaacgtctatatcatggccgacaagcagaagaacggcatcaaggtgaacttcaagatccgccacaacatcgaggacggcagcgtgcagctcgccgaccactaccagcagaacacccccatcggcgacggccccgtgctgctgcccgacaaccactacctgagcacccagtccgccctgagcaaagaccccaacgagaagcgcgatcacatggtcctgctggagttcgtgaccgccgccgggatcactctcggcatggacgagctgtacaagtaacctgcaggcgccggcgcatagctcttatgatagcaatgtcagcagtgcctttgagaatcctgatggagcgggttaagattctaaaattatcacgctccatgagtgattctcagaagtaaggttgaccatactctacagttgtggagctcgctgatcagcctcgactgtgccttctagttgccagccatctgttgtttgcccctcccccgtgccttccttgaccctggaaggtgccactcccactgtcctttcctaataaaatgaggaaattgcatcgcattgtctgagtaggtgtcattctattctggggggtggggtggggcaggacagcaagggggaggattgggaagacaatagcaggcatgctggggatgcggtgggctctatggaagcttgaattcagctgacgtgcctcggaccgctaggaacccctagtgatggagttggccactccctctctgcgcgctcgctcgctcactgaggccgggcgaccaaaggtcgcccgacgcccgggctttgcccgggcggcctcagtgagcgagcgagcgcgcag

SEQ ID NO: 214 - DNA, 2978 bp, Artificial Sequence
  source: /note="Description of Artificial Sequence: Synthetic polynucleotide"
ctgcgcgctcgctcgctcactgaggccgcccgggcgtcgggcgacctttggtcgcccggcctcagtgagcgagcgagcgcgcagagagggagtggccaactccatcactaggggttcctgcggccgcacgcgtgacattgattattgactagttattaatagtaatcaattacggggtcattagttcatagcccatatatggagttccgcgttacataacttacggtaaatggcccgcctggctgaccgcccaacgacccccgcccattgacgtcaataatgacgtatgttcccatagtaacgccaatagggactttccattgacgtcaatgggtggactatttacggtaaactgcccacttggcagtacatcaagtgtatcatatgccaagtacgccccctattgacgtcaatgacggtaaatggcccgcctggcattatgcccagtacatgaccttatgggactttcctacttggcagtacatctacgtattagtcatcgctattaccatgggtcgaggtgagccccacgttctgcttcactctccccatctcccccccctccccacccccaattttgtatttatttattttttaattattttgtgcagcgatgggggcggggggggggggggcgcgcgccaggcggggcggggcggggcgaggggcggggcggggcgaggcggagaggtgcggcggcagccaatcagagcggcgcgctccgaaagtttccttttatggcgaggcggcggcggcggcggccctataaaaagcgaagcgcgcggcgggcgggagtcgctgcgttgccttcgccccgtgccccgctccgcgccgcctcgcgccgcccgccccggctctgactgaccgcgttactcccacaggtgagcgggcgggacggcccttctcctccgggctgtaattagcgcttggtttaatgacggctcgtttcttttctgtggctgcgtgaaagccttaaagggctccgggagggccctttgtgcgggggggagcggctcggggggtgcgtgcgtgtgtgtgtgcgtggggagcgccgcgtgcggcccgcgctgcccggcggctgtgagcgctgcgggcgcggcgcggggctttgtgcgctccgcgtgtgcgcgaggggagcgcggccgggggcggtgccccgcggtgcgggggggctgcgaggggaacaaaggctgcgtgcggggtgtgtgcgtgggggggtgagcagggggtgtgggcgcggcggtcgggctgtaacccccccctgcacccccctccccgagttgctgagcacggcccggcttcgggtgcggggctccgtgcggggcgtggcgcggggctcgccgtgccgggcggggggtggcggcaggtgggggtgccgggcggggcggggccgcctcgggccggggagggctcgggggaggggcgcggcggcccccggagcgccggcggagcaggaggaccaaggccctggcgaaggccgtggcctcgttgagaatcctgatggagcggtgtgcaggtcccaatggccgctccataaggattctccacggggacgcgggcctggacgccggcatccgggctcaggacccccctctctagagcctctgctaaccatgttcatgccttcttctttttcctacagctcctgggcaacgtgctggttattgtgaccggtcgctagccaccatggtgagcaagggcgaggagctgttcaccggggtggtgcccatcctggtcgagctggacggcgacgtaaacggccacaagttcagcgtgtccggcgagggcgagggcgatgccacctacggcaagctgaccctgaagttcatctgcaccaccggcaagctgcccgtgccctggcccaccctcgtgaccaccctgacctacggcgtgcagtgcttcagccgctaccccgaccacatgaagcagcacgacttcttcaagtccgccatgcccgaaggctacgtccaggagcgcaccatcttcttcaaggacgacggcaactacaagacccgcgccgaggtgaagttcgagggcgacaccctggtgaaccgcatcgagctgaagggcatcgacttcaaggaggacggcaacatcctggggcacaagctggagtacaactacaacagccacaacgtctatatcatggccgacaagcagaagaacggcatcaaggtgaacttcaagatccgccacaacatcgaggacggcagcgtgcagctcgccgaccactaccagcagaacacccccatcggcgacggccccgtgctgctgcccgacaaccactacctgagcacccagtccgccctgagcaaagaccccaacgagaagcgcgatcacatggtcctgctggagttcgtgaccgccgccgggatcactctcggcatggacgagctgtacaagtaacctgcaggcgccggcggagcaggaggaccaaggccctggcgaaggccgtggcctcgttgagaatcctgatggagcggtgtgcaggtcccaatggccgctccataaggattctccacggggacgcgggcctggacgccggcatccgggctcaggacccccctcgagctcgctgatcagcctcgactgtgccttctagttgccagccatctgttgtttgcccctcccccgtgccttccttgaccctggaaggtgccactcccactgtcctttcctaataaaatgaggaaattgcatcgcattgtctgagtaggtgtcattctattctggggggtggggtggggcaggacagcaagggggaggattgggaagacaatagcaggcatgctggggatgcggtgggctctatggaagcttgaattcagctgacgtgcctcggaccgctaggaacccctagtgatggagttggccactccctctctgcgcgctcgctcgctcactgaggccgggcgaccaaaggtcgcccgacgcccgggctttgcccgggcggcctcagtgagcgagcgagcgcgcag

SEQ ID NO: 215 - DNA, 2982 bp, Artificial Sequence
  source: /note="Description of Artificial Sequence: Synthetic polynucleotide"
ctgcgcgctcgctcgctcactgaggccgcccgggcgtcgggcgacctttggtcgcccggcctcagtgagcgagcgagcgcgcagagagggagtggccaactccatcactaggggttcctgcggccgcacgcgtgacattgattattgactagttattaatagtaatcaattacggggtcattagttcatagcccatatatggagttccgcgttacataacttacggtaaatggcccgcctggctgaccgcccaacgacccccgcccattgacgtcaataatgacgtatgttcccatagtaacgccaatagggactttccattgacgtcaatgggtggactatttacggtaaactgcccacttggcagtacatcaagtgtatcatatgccaagtacgccccctattgacgtcaatgacggtaaatggcccgcctggcattatgcccagtacatgaccttatgggactttcctacttggcagtacatctacgtattagtcatcgctattaccatgggtcgaggtgagccccacgttctgcttcactctccccatctcccccccctccccacccccaattttgtatttatttattttttaattattttgtgcagcgatgggggcggggggggggggggcgcgcgccaggcggggcggggcggggcgaggggcggggcggggcgaggcggagaggtgcggcggcagccaatcagagcggcgcgctccgaaagtttccttttatggcgaggcggcggcggcggcggccctataaaaagcgaagcgcgcggcgggcgggagtcgctgcgttgccttcgccccgtgccccgctccgcgccgcctcgcgccgcccgccccggctctgactgaccgcgttactcccacaggtgagcgggcgggacggcccttctcctccgggctgtaattagcgcttggtttaatgacggctcgtttcttttctgtggctgcgtgaaagccttaaagggctccgggagggccctttgtgcgggggggagcggctcggggggtgcgtgcgtgtgtgtgtgcgtggggagcgccgcgtgcggcccgcgctgcccggcggctgtgagcgctgcgggcgcggcgcggggctttgtgcgctccgcgtgtgcgcgaggggagcgcggccgggggcggtgccccgcggtgcgggggggctgcgaggggaacaaaggctgcgtgcggggtgtgtgcgtgggggggtgagcagggggtgtgggcgcggcggtcgggctgtaacccccccctgcacccccctccccgagttgctgagcacggcccggcttcgggtgcggggctccgtgcggggcgtggcgcggggctcgccgtgccgggcggggggtggcggcaggtgggggtgccgggcggggcggggccgcctcgggccggggagggctcgggggaggggcgcggcggcccccggagcgccggcggtgtccccagagagcccgcaccagtgccatctgcttggccgatttgagaatcctgatggagcggcttgtgtctctccgctctgagccgggccatcagattctcatatgggaaaagcaggacccgcagctgcgtccgcctcccctgcattctagagcctctgctaaccatgttcatgccttcttctttttcctacagctcctgggcaacgtgctggttattgtgaccggtcgctagccaccatggtgagcaagggcgaggagctgttcaccggggtggtgcccatcctggtcgagctggacggcgacgtaaacggccacaagttcagcgtgtccggcgagggcgagggcgatgccacctacggcaagctgaccctgaagttcatctgcaccaccggcaagctgcccgtgccctggcccaccctcgtgaccaccctgacctacggcgtgcagtgcttcagccgctaccccgaccacatgaagcagcacgacttcttcaagtccgccatgcccgaaggctacgtccaggagcgcaccatcttcttcaaggacgacggcaactacaagacccgcgccgaggtgaagttcgagggcgacaccctggtgaaccgcatcgagctgaagggcatcgacttcaaggaggacggcaacatcctggggcacaagctggagtacaactacaacagccacaacgtctatatcatggccgacaagcagaagaacggcatcaaggtgaacttcaagatccgccacaacatcgaggacggcagcgtgcagctcgccgaccactaccagcagaacacccccatcggcgacggccccgtgctgctgcccgacaaccactacctgagcacccagtccgccctgagcaaagaccccaacgagaagcgcgatcacatggtcctgctggagttcgtgaccgccgccgggatcactctcggcatggacgagctgtacaagtaacctgcaggcgccggcggtgtccccagagagcccgcaccagtgccatctgcttggccgatttgagaatcctgatggagcggcttgtgtctctccgctctgagccgggccatcagattctcatatgggaaaagcaggacccgcagctgcgtccgcctcccctgcatgagctcgctgatcagcctcgactgtgccttctagttgccagccatctgttgtttgcccctcccccgtgccttccttgaccctggaaggtgccactcccactgtcctttcctaataaaatgaggaaattgcatcgcattgtctgagtaggtgtcattctattctggggggtggggtggggcaggacagcaagggggaggattgggaagacaatagcaggcatgctggggatgcggtgggctctatggaagcttgaattcagctgacgtgcctcggaccgctaggaacccctagtgatggagttggccactccctctctgcgcgctcgctcgctcactgaggccgggcgaccaaaggtcgcccgacgcccgggctttgcccgggcggcctcagtgagcgagcgagcgcgcag

SEQ ID NO: 216 - DNA, 2980 bp, Artificial Sequence
  source: /note="Description of Artificial Sequence: Synthetic polynucleotide"
ctgcgcgctcgctcgctcactgaggccgcccgggcgtcgggcgacctttggtcgcccggcctcagtgagcgagcgagcgcgcagagagggagtggccaactccatcactaggggttcctgcggccgcacgcgtgacattgattattgactagttattaatagtaatcaattacggggtcattagttcatagcccatatatggagttccgcgttacataacttacggtaaatggcccgcctggctgaccgcccaacgacccccgcccattgacgtcaataatgacgtatgttcccatagtaacgccaatagggactttccattgacgtcaatgggtggactatttacggtaaactgcccacttggcagtacatcaagtgtatcatatgccaagtacgccccctattgacgtcaatgacggtaaatggcccgcctggcattatgcccagtacatgaccttatgggactttcctacttggcagtacatctacgtattagtcatcgctattaccatgggtcgaggtgagccccacgttctgcttcactctccccatctcccccccctccccacccccaattttgtatttatttattttttaattattttgtgcagcgatgggggcggggggggggggggcgcgcgccaggcggggcggggcggggcgaggggcggggcggggcgaggcggagaggtgcggcggcagccaatcagagcggcgcgctccgaaagtttccttttatggcgaggcggcggcggcggcggccctataaaaagcgaagcgcgcggcgggcgggagtcgctgcgttgccttcgccccgtgccccgctccgcgccgcctcgcgccgcccgccccggctctgactgaccgcgttactcccacaggtgagcgggcgggacggcccttctcctccgggctgtaattagcgcttggtttaatgacggctcgtttcttttctgtggctgcgtgaaagccttaaagggctccgggagggccctttgtgcgggggggagcggctcggggggtgcgtgcgtgtgtgtgtgcgtggggagcgccgcgtgcggcccgcgctgcccggcggctgtgagcgctgcgggcgcggcgcggggctttgtgcgctccgcgtgtgcgcgaggggagcgcggccgggggcggtgccccgcggtgcgggggggctgcgaggggaacaaaggctgcgtgcggggtgtgtgcgtgggggggtgagcagggggtgtgggcgcggcggtcgggctgtaacccccccctgcacccccctccccgagttgctgagcacggcccggcttcgggtgcggggctccgtgcggggcgtggcgcggggctcgccgtgccgggcggggggtggcggcaggtgggggtgccgggcggggcggggccgcctcgggccggggagggctcgggggaggggcgcggcggcccccggagcgccggcgtgaagttaacaccttcgtggctacagagtttccttagcagagctgttgagaatcctgatggagcgggtgtctaaactatcccgctccatccggattctacatagctactgctaggcaatccttccctcgataaatgtcttggcatcgtctagagcctctgctaaccatgttcatgccttcttctttttcctacagctcctgggcaacgtgctggttattgtgaccggtcgctagccaccatggtgagcaagggcgaggagctgttcaccggggtggtgcccatcctggtcgagctggacggcgacgtaaacggccacaagttcagcgtgtccggcgagggcgagggcgatgccacctacggcaagctgaccctgaagttcatctgcaccaccggcaagctgcccgtgccctggcccaccctcgtgaccaccctgacctacggcgtgcagtgcttcagccgctaccccgaccacatgaagcagcacgacttcttcaagtccgccatgcccgaaggctacgtccaggagcgcaccatcttcttcaaggacgacggcaactacaagacccgcgccgaggtgaagttcgagggcgacaccctggtgaaccgcatcgagctgaagggcatcgacttcaaggaggacggcaacatcctggggcacaagctggagtacaactacaacagccacaacgtctatatcatggccgacaagcagaagaacggcatcaaggtgaacttcaagatccgccacaacatcgaggacggcagcgtgcagctcgccgaccactaccagcagaacacccccatcggcgacggccccgtgctgctgcccgacaaccactacctgagcacccagtccgccctgagcaaagaccccaacgagaagcgcgatcacatggtcctgctggagttcgtgaccgccgccgggatcactctcggcatggacgagctgtacaagtaacctgcaggcgccggcgtgaagttaacaccttcgtggctacagagtttccttagcagagctgttgagaatcctgatggagcgggtgtctaaactatcccgctccatccggattctacatagctactgctaggcaatccttccctcgataaatgtcttggcatcggagctcgctgatcagcctcgactgtgccttctagttgccagccatctgttgtttgcccctcccccgtgccttccttgaccctggaaggtgccactcccactgtcctttcctaataaaatgaggaaattgcatcgcattgtctgagtaggtgtcattctattctggggggtggggtggggcaggacagcaagggggaggattgggaagacaatagcaggcatgctggggatgcggtgggctctatggaagcttgaattcagctgacgtgcctcggaccgctaggaacccctagtgatggagttggccactccctctctgcgcgctcgctcgctcactgaggccgggcgaccaaaggtcgcccgacgcccgggctttgcccgggcggcctcagtgagcgagcgagcgcgcag

SEQ ID NO: 217 - DNA, 2928 bp, Artificial Sequence
  source: /note="Description of Artificial Sequence: Synthetic polynucleotide"
ctgcgcgctcgctcgctcactgaggccgcccgggcgtcgggcgacctttggtcgcccggcctcagtgagcgagcgagcgcgcagagagggagtggccaactccatcactaggggttcctgcggccgcacgcgtgacattgattattgactagttattaatagtaatcaattacggggtcattagttcatagcccatatatggagttccgcgttacataacttacggtaaatggcccgcctggctgaccgcccaacgacccccgcccattgacgtcaataatgacgtatgttcccatagtaacgccaatagggactttccattgacgtcaatgggtggactatttacggtaaactgcccacttggcagtacatcaagtgtatcatatgccaagtacgccccctattgacgtcaatgacggtaaatggcccgcctggcattatgcccagtacatgaccttatgggactttcctacttggcagtacatctacgtattagtcatcgctattaccatgggtcgaggtgagccccacgttctgcttcactctccccatctcccccccctccccacccccaattttgtatttatttattttttaattattttgtgcagcgatgggggcggggggggggggggcgcgcgccaggcggggcggggcggggcgaggggcggggcggggcgaggcggagaggtgcggcggcagccaatcagagcggcgcgctccgaaagtttccttttatggcgaggcggcggcggcggcggccctataaaaagcgaagcgcgcggcgggcgggagtcgctgcgttgccttcgccccgtgccccgctccgcgccgcctcgcgccgcccgccccggctctgactgaccgcgttactcccacaggtgagcgggcgggacggcccttctcctccgggctgtaattagcgcttggtttaatgacggctcgtttcttttctgtggctgcgtgaaagccttaaagggctccgggagggccctttgtgcgggggggagcggctcggggggtgcgtgcgtgtgtgtgtgcgtggggagcgccgcgtgcggcccgcgctgcccggcggctgtgagcgctgcgggcgcggcgcggggctttgtgcgctccgcgtgtgcgcgaggggagcgcggccgggggcggtgccccgcggtgcgggggggctgcgaggggaacaaaggctgcgtgcggggtgtgtgcgtgggggggtgagcagggggtgtgggcgcggcggtcgggctgtaacccccccctgcacccccctccccgagttgctgagcacggcccggcttcgggtgcggggctccgtgcggggcgtggcgcggggctcgccgtgccgggcggggggtggcggcaggtgggggtgccgggcggggcggggccgcctcgggccggggagggctcgggggaggggcgcggcggcccccggagcgccggcggccgctggacccctccactctgctgtggccttgagaatcctgatggagcgggattgctgtcccaaactcccgctccatcggattctcaaggctacagtgaggggcgagctccttctcctgctctagagcctctgctaaccatgttcatgccttcttctttttcctacagctcctgggcaacgtgctggttattgtgaccggtcgctagccaccatggtgagcaagggcgaggagctgttcaccggggtggtgcccatcctggtcgagctggacggcgacgtaaacggccacaagttcagcgtgtccggcgagggcgagggcgatgccacctacggcaagctgaccctgaagttcatctgcaccaccggcaagctgcccgtgccctggcccaccctcgtgaccaccctgacctacggcgtgcagtgcttcagccgctaccccgaccacatgaagcagcacgacttcttcaagtccgccatgcccgaaggctacgtccaggagcgcaccatcttcttcaaggacgacggcaactacaagacccgcgccgaggtgaagttcgagggcgacaccctggtgaaccgcatcgagctgaagggcatcgacttcaaggaggacggcaacatcctggggcacaagctggagtacaactacaacagccacaacgtctatatcatggccgacaagcagaagaacggcatcaaggtgaacttcaagatccgccacaacatcgaggacggcagcgtgcagctcgccgaccactaccagcagaacacccccatcggcgacggccccgtgctgctgcccgacaaccactacctgagcacccagtccgccctgagcaaagaccccaacgagaagcgcgatcacatggtcctgctggagttcgtgaccgccgccgggatcactctcggcatggacgagctgtacaagtaacctgcaggcgccggcggccgctggacccctccactctgctgtggccttgagaatcctgatggagcgggattgctgtcccaaactcccgctccatcggattctcaaggctacagtgaggggcgagctccttctcctgcgagctcgctgatcagcctcgactgtgccttctagttgccagccatctgttgtttgcccctcccccgtgccttccttgaccctggaaggtgccactcccactgtcctttcctaataaaatgaggaaattgcatcgcattgtctgagtaggtgtcattctattctggggggtggggtggggcaggacagcaagggggaggattgggaagacaatagcaggcatgctggggatgcggtgggctctatggaagcttgaattcagctgacgtgcctcggaccgctaggaacccctagtgatggagttggccactccctctctgcgcgctcgctcgctcactgaggccgggcgaccaaaggtcgcccgacgcccgggctttgcccgggcggcctcagtgagcgagcgagcgcgcag

SEQ ID NO: 218 - DNA, 2984 bp, Artificial Sequence
  source: /note="Description of Artificial Sequence: Synthetic polynucleotide"
ctgcgcgctcgctcgctcactgaggccgcccgggcgtcgggcgacctttggtcgcccggcctcagtgagcgagcgagcgcgcagagagggagtggccaactccatcactaggggttcctgcggccgcacgcgtgacattgattattgactagttattaatagtaatcaattacggggtcattagttcatagcccatatatggagttccgcgttacataacttacggtaaatggcccgcctggctgaccgcccaacgacccccgcccattgacgtcaataatgacgtatgttcccatagtaacgccaatagggactttccattgacgtcaatgggtggactatttacggtaaactgcccacttggcagtacatcaagtgtatcatatgccaagtacgccccctattgacgtcaatgacggtaaatggcccgcctggcattatgcccagtacatgaccttatgggactttcctacttggcagtacatctacgtattagtcatcgctattaccatgggtcgaggtgagccccacgttctgcttcactctccccatctcccccccctccccacccccaattttgtatttatttattttttaattattttgtgcagcgatgggggcggggggggggggggcgcgcgccaggcggggcggggcggggcgaggggcggggcggggcgaggcggagaggtgcggcggcagccaatcagagcggcgcgctccgaaagtttccttttatggcgaggcggcggcggcggcggccctataaaaagcgaagcgcgcggcgggcgggagtcgctgcgttgccttcgccccgtgccccgctccgcgccgcctcgcgccgcccgccccggctctgactgaccgcgttactcccacaggtgagcgggcgggacggcccttctcctccgggctgtaattagcgcttggtttaatgacggctcgtttcttttctgtggctgcgtgaaagccttaaagggctccgggagggccctttgtgcgggggggagcggctcggggggtgcgtgcgtgtgtgtgtgcgtggggagcgccgcgtgcggcccgcgctgcccggcggctgtgagcgctgcgggcgcggcgcggggctttgtgcgctccgcgtgtgcgcgaggggagcgcggccgggggcggtgccccgcggtgcgggggggctgcgaggggaacaaaggctgcgtgcggggtgtgtgcgtgggggggtgagcagggggtgtgggcgcggcggtcgggctgtaacccccccctgcacccccctccccgagttgctgagcacggcccggcttcgggtgcggggctccgtgcggggcgtggcgcggggctcgccgtgccgggcggggggtggcggcaggtgggggtgccgggcggggcggggccgcctcgggccggggagggctcgggggaggggcgcggcggcccccggagcgccggcgctccccagctcctggggggagctgcttgcctccccccgttttgagaatcctgatggagcggactggtgaggtaacaggatccgccgtccatctttattctcactatggggcgaggactcagccggcaccctgtgcacagccagcgagggtctagagcctctgctaaccatgttcatgccttcttctttttcctacagctcctgggcaacgtgctggttattgtgaccggtcgctagccaccatggtgagcaagggcgaggagctgttcaccggggtggtgcccatcctggtcgagctggacggcgacgtaaacggccacaagttcagcgtgtccggcgagggcgagggcgatgccacctacggcaagctgaccctgaagttcatctgcaccaccggcaagctgcccgtgccctggcccaccctcgtgaccaccctgacctacggcgtgcagtgcttcagccgctaccccgaccacatgaagcagcacgacttcttcaagtccgccatgcccgaaggctacgtccaggagcgcaccatcttcttcaaggacgacggcaactacaagacccgcgccgaggtgaagttcgagggcgacaccctggtgaaccgcatcgagctgaagggcatcgacttcaaggaggacggcaacatcctggggcacaagctggagtacaactacaacagccacaacgtctatatcatggccgacaagcagaagaacggcatcaaggtgaacttcaagatccgccacaacatcgaggacggcagcgtgcagctcgccgaccactaccagcagaacacccccatcggcgacggccccgtgctgctgcccgacaaccactacctgagcacccagtccgccctgagcaaagaccccaacgagaagcgcgatcacatggtcctgctggagttcgtgaccgccgccgggatcactctcggcatggacgagctgtacaagtaacctgcaggcgccggcgctccccagctcctggggggagctgcttgcctccccccgttttgagaatcctgatggagcggactggtgaggtaacaggatccgccgtccatctttattctcactatggggcgaggactcagccggcaccctgtgcacagccagcgaggggagctcgctgatcagcctcgactgtgccttctagttgccagccatctgttgtttgcccctcccccgtgccttccttgaccctggaaggtgccactcccactgtcctttcctaataaaatgaggaaattgcatcgcattgtctgagtaggtgtcattctattctggggggtggggtggggcaggacagcaagggggaggattgggaagacaatagcaggcatgctggggatgcggtgggctctatggaagcttgaattcagctgacgtgcctcggaccgctaggaacccctagtgatggagttggccactccctctctgcgcgctcgctcgctcactgaggccgggcgaccaaaggtcgcccgacgcccgggctttgcccgggcggcctcagtgagcgagcgagcgcgcag

SEQ ID NO: 219 - DNA, 2966 bp, Artificial Sequence
  source: /note="Description of Artificial Sequence: Synthetic polynucleotide"
ctgcgcgctcgctcgctcactgaggccgcccgggcgtcgggcgacctttggtcgcccggcctcagtgagcgagcgagcgcgcagagagggagtggccaactccatcactaggggttcctgcggccgcacgcgtgacattgattattgactagttattaatagtaatcaattacggggtcattagttcatagcccatatatggagttccgcgttacataacttacggtaaatggcccgcctggctgaccgcccaacgacccccgcccattgacgtcaataatgacgtatgttcccatagtaacgccaatagggactttccattgacgtcaatgggtggactatttacggtaaactgcccacttggcagtacatcaagtgtatcatatgccaagtacgccccctattgacgtcaatgacggtaaatggcccgcctggcattatgcccagtacatgaccttatgggactttcctacttggcagtacatctacgtattagtcatcgctattaccatgggtcgaggtgagccccacgttctgcttcactctccccatctcccccccctccccacccccaattttgtatttatttattttttaattattttgtgcagcgatgggggcggggggggggggggcgcgcgccaggcggggcggggcggggcgaggggcggggcggggcgaggcggagaggtgcggcggcagccaatcagagcggcgcgctccgaaagtttccttttatggcgaggcggcggcggcggcggccctataaaaagcgaagcgcgcggcgggcgggagtcgctgcgttgccttcgccccgtgccccgctccgcgccgcctcgcgccgcccgccccggctctgactgaccgcgttactcccacaggtgagcgggcgggacggcccttctcctccgggctgtaattagcgcttggtttaatgacggctcgtttcttttctgtggctgcgtgaaagccttaaagggctccgggagggccctttgtgcgggggggagcggctcggggggtgcgtgcgtgtgtgtgtgcgtggggagcgccgcgtgcggcccgcgctgcccggcggctgtgagcgctgcgggcgcggcgcggggctttgtgcgctccgcgtgtgcgcgaggggagcgcggccgggggcggtgccccgcggtgcgggggggctgcgaggggaacaaaggctgcgtgcggggtgtgtgcgtgggggggtgagcagggggtgtgggcgcggcggtcgggctgtaacccccccctgcacccccctccccgagttgctgagcacggcccggcttcgggtgcggggctccgtgcggggcgtggcgcggggctcgccgtgccgggcggggggtggcggcaggtgggggtgccgggcggggcggggccgcctcgggccggggagggctcgggggaggggcgcggcggcccccggagcgccggcgagggtcggcaggccgcagagtgtgactcctgttctgtgtttgagaatcctgatggagcgggtgaacagtctcagtcccgctcccaggaaatggtcaaaaacagagcagagacagatccacgagggcctccggagcacctttctagagcctctgctaaccatgttcatgccttcttctttttcctacagctcctgggcaacgtgctggttattgtgaccggtcgctagccaccatggtgagcaagggcgaggagctgttcaccggggtggtgcccatcctggtcgagctggacggcgacgtaaacggccacaagttcagcgtgtccggcgagggcgagggcgatgccacctacggcaagctgaccctgaagttcatctgcaccaccggcaagctgcccgtgccctggcccaccctcgtgaccaccctgacctacggcgtgcagtgcttcagccgctaccccgaccacatgaagcagcacgacttcttcaagtccgccatgcccgaaggctacgtccaggagcgcaccatcttcttcaaggacgacggcaactacaagacccgcgccgaggtgaagttcgagggcgacaccctggtgaaccgcatcgagctgaagggcatcgacttcaaggaggacggcaacatcctggggcacaagctggagtacaactacaacagccacaacgtctatatcatggccgacaagcagaagaacggcatcaaggtgaacttcaagatccgccacaacatcgaggacggcagcgtgcagctcgccgaccactaccagcagaacacccccatcggcgacggccccgtgctgctgcccgacaaccactacctgagcacccagtccgccctgagcaaagaccccaacgagaagcgcgatcacatggtcctgctggagttcgtgaccgccgccgggatcactctcggcatggacgagctgtacaagtaacctgcaggcgccggcgagggtcggcaggccgcagagtgtgactcctgttctgtgtttgagaatcctgatggagcgggtgaacagtctcagtcccgctcccaggaaatggtcaaaaacagagcagagacagatccacgagggcctccggagcaccttgagctcgctgatcagcctcgactgtgccttctagttgccagccatctgttgtttgcccctcccccgtgccttccttgaccctggaaggtgccactcccactgtcctttcctaataaaatgaggaaattgcatcgcattgtctgagtaggtgtcattctattctggggggtggggtggggcaggacagcaagggggaggattgggaagacaatagcaggcatgctggggatgcggtgggctctatggaagcttgaattcagctgacgtgcctcggaccgctaggaacccctagtgatggagttggccactccctctctgcgcgctcgctcgctcactgaggccgggcgaccaaaggtcgcccgacgcccgggctttgcccgggcggcctcagtgagcgagcgagcgcgcag

SEQ ID NO: 220 - DNA, 2932 bp, Artificial Sequence
  source: /note="Description of Artificial Sequence: Synthetic polynucleotide"
ctgcgcgctcgctcgctcactgaggccgcccgggcgtcgggcgacctttggtcgcccggcctcagtgagcgagcgagcgcgcagagagggagtggccaactccatcactaggggttcctgcggccgcacgcgtgacattgattattgactagttattaatagtaatcaattacggggtcattagttcatagcccatatatggagttccgcgttacataacttacggtaaatggcccgcctggctgaccgcccaacgacccccgcccattgacgtcaataatgacgtatgttcccatagtaacgccaatagggactttccattgacgtcaatgggtggactatttacggtaaactgcccacttggcagtacatcaagtgtatcatatgccaagtacgccccctattgacgtcaatgacggtaaatggcccgcctggcattatgcccagtacatgaccttatgggactttcctacttggcagtacatctacgtattagtcatcgctattaccatgggtcgaggtgagccccacgttctgcttcactctccccatctcccccccctccccacccccaattttgtatttatttattttttaattattttgtgcagcgatgggggcggggggggggggggcgcgcgccaggcggggcggggcggggcgaggggcggggcggggcgaggcggagaggtgcggcggcagccaatcagagcggcgcgctccgaaagtttccttttatggcgaggcggcggcggcggcggccctataaaaagcgaagcgcgcggcgggcgggagtcgctgcgttgccttcgccccgtgccccgctccgcgccgcctcgcgccgcccgccccggctctgactgaccgcgttactcccacaggtgagcgggcgggacggcccttctcctccgggctgtaattagcgcttggtttaatgacggctcgtttcttttctgtggctgcgtgaaagccttaaagggctccgggagggccctttgtgcgggggggagcggctcggggggtgcgtgcgtgtgtgtgtgcgtggggagcgccgcgtgcggcccgcgctgcccggcggctgtgagcgctgcgggcgcggcgcggggctttgtgcgctccgcgtgtgcgcgaggggagcgcggccgggggcggtgccccgcggtgcgggggggctgcgaggggaacaaaggctgcgtgcggggtgtgtgcgtgggggggtgagcagggggtgtgggcgcggcggtcgggctgtaacccccccctgcacccccctccccgagttgctgagcacggcccggcttcgggtgcggggctccgtgcggggcgtggcgcggggctcgccgtgccgggcggggggtggcggcaggtgggggtgccgggcggggcggggccgcctcgggccggggagggctcgggggaggggcgcggcggcccccggagcgccggcggaaacagattggaaatgatttgttttgagcgggggttgagaatcctgatggagcgggtttgtcataaaccccgctccctcaggattcccaacctcctctcatttgctatattcaattaagtaatctagagcctctgctaaccatgttcatgccttcttctttttcctacagctcctgggcaacgtgctggttattgtgaccggtcgctagccaccatggtgagcaagggcgaggagctgttcaccggggtggtgcccatcctggtcgagctggacggcgacgtaaacggccacaagttcagcgtgtccggcgagggcgagggcgatgccacctacggcaagctgaccctgaagttcatctgcaccaccggcaagctgcccgtgccctggcccaccctcgtgaccaccctgacctacggcgtgcagtgcttcagccgctaccccgaccacatgaagcagcacgacttcttcaagtccgccatgcccgaaggctacgtccaggagcgcaccatcttcttcaaggacgacggcaactacaagacccgcgccgaggtgaagttcgagggcgacaccctggtgaaccgcatcgagctgaagggcatcgacttcaaggaggacggcaacatcctggggcacaagctggagtacaactacaacagccacaacgtctatatcatggccgacaagcagaagaacggcatcaaggtgaacttcaagatccgccacaacatcgaggacggcagcgtgcagctcgccgaccactaccagcagaacacccccatcggcgacggccccgtgctgctgcccgacaaccactacctgagcacccagtccgccctgagcaaagaccccaacgagaagcgcgatcacatggtcctgctggagttcgtgaccgccgccgggatcactctcggcatggacgagctgtacaagtaacctgcaggcgccggcggaaacagattggaaatgatttgttttgagcgggggttgagaatcctgatggagcgggtttgtcataaaccccgctccctcaggattcccaacctcctctcatttgctatattcaattaagtaagagctcgctgatcagcctcgactgtgccttctagttgccagccatctgttgtttgcccctcccccgtgccttccttgaccctggaaggtgccactcccactgtcctttcctaataaaatgaggaaattgcatcgcattgtctgagtaggtgtcattctattctggggggtggggtggggcaggacagcaagggggaggattgggaagacaatagcaggcatgctggggatgcggtgggctctatggaagcttgaattcagctgacgtgcctcggaccgctaggaacccctagtgatggagttggccactccctctctgcgcgctcgctcgctcactgaggccgggcgaccaaaggtcgcccgacgcccgggctttgcccgggcggcctcagtgagcgagcgagcgcgcag

SEQ ID NO: 221 - DNA, 2890 bp, Artificial Sequence
  source: /note="Description of Artificial Sequence: Synthetic polynucleotide"
ctgcgcgctcgctcgctcactgaggccgcccgggcgtcgggcgacctttggtcgcccggcctcagtgagcgagcgagcgcgcagagagggagtggccaactccatcactaggggttcctgcggccgcacgcgtgacattgattattgactagttattaatagtaatcaattacggggtcattagttcatagcccatatatggagttccgcgttacataacttacggtaaatggcccgcctggctgaccgcccaacgacccccgcccattgacgtcaataatgacgtatgttcccatagtaacgccaatagggactttccattgacgtcaatgggtggactatttacggtaaactgcccacttggcagtacatcaagtgtatcatatgccaagtacgccccctattgacgtcaatgacggtaaatggcccgcctggcattatgcccagtacatgaccttatgggactttcctacttggcagtacatctacgtattagtcatcgctattaccatgggtcgaggtgagccccacgttctgcttcactctccccatctcccccccctccccacccccaattttgtatttatttattttttaattattttgtgcagcgatgggggcggggggggggggggcgcgcgccaggcggggcggggcggggcgaggggcggggcggggcgaggcggagaggtgcggcggcagccaatcagagcggcgcgctccgaaagtttccttttatggcgaggcggcggcggcggcggccctataaaaagcgaagcgcgcggcgggcgggagtcgctgcgttgccttcgccccgtgccccgctccgcgccgcctcgcgccgcccgccccggctctgactgaccgcgttactcccacaggtgagcgggcgggacggcccttctcctccgggctgtaattagcgcttggtttaatgacggctcgtttcttttctgtggctgcgtgaaagccttaaagggctccgggagggccctttgtgcgggggggagcggctcggggggtgcgtgcgtgtgtgtgtgcgtggggagcgccgcgtgcggcccgcgctgcccggcggctgtgagcgctgcgggcgcggcgcggggctttgtgcgctccgcgtgtgcgcgaggggagcgcggccgggggcggtgccccgcggtgcgggggggctgcgaggggaacaaaggctgcgtgcggggtgtgtgcgtgggggggtgagcagggggtgtgggcgcggcggtcgggctgtaacccccccctgcacccccctccccgagttgctgagcacggcccggcttcgggtgcggggctccgtgcggggcgtggcgcggggctcgccgtgccgggcggggggtggcggcaggtgggggtgccgggcggggcggggccgcctcgggccggggagggctcgggggaggggcgcggcggcccccggagcgccggcgtgactgccagggcacttgggaatggcaaggttgagaatcctgatggagcggattccatcaggattctcagtcttgctatacccagaaaacgtgccaggaagatctagagcctctgctaaccatgttcatgccttcttctttttcctacagctcctgggcaacgtgctggttattgtgaccggtcgctagccaccatggtgagcaagggcgaggagctgttcaccggggtggtgcccatcctggtcgagctggacggcgacgtaaacggccacaagttcagcgtgtccggcgagggcgagggcgatgccacctacggcaagctgaccctgaagttcatctgcaccaccggcaagctgcccgtgccctggcccaccctcgtgaccaccctgacctacggcgtgcagtgcttcagccgctaccccgaccacatgaagcagcacgacttcttcaagtccgccatgcccgaaggctacgtccaggagcgcaccatcttcttcaaggacgacggcaactacaagacccgcgccgaggtgaagttcgagggcgacaccctggtgaaccgcatcgagctgaagggcatcgacttcaaggaggacggcaacatcctggggcacaagctggagtacaactacaacagccacaacgtctatatcatggccgacaagcagaagaacggcatcaaggtgaacttcaagatccgccacaacatcgaggacggcagcgtgcagctcgccgaccactaccagcagaacacccccatcggcgacggccccgtgctgctgcccgacaaccactacctgagcacccagtccgccctgagcaaagaccccaacgagaagcgcgatcacatggtcctgctggagttcgtgaccgccgccgggatcactctcggcatggacgagctgtacaagtaacctgcaggcgccggcgtgactgccagggcacttgggaatggcaaggttgagaatcctgatggagcggattccatcaggattctcagtcttgctatacccagaaaacgtgccaggaagagagctcgctgatcagcctcgactgtgccttctagttgccagccatctgttgtttgcccctcccccgtgccttccttgaccctggaaggtgccactcccactgtcctttcctaataaaatgaggaaattgcatcgcattgtctgagtaggtgtcattctattctggggggtggggtggggcaggacagcaagggggaggattgggaagacaatagcaggcatgctggggatgcggtgggctctatggaagcttgaattcagctgacgtgcctcggaccgctaggaacccctagtgatggagttggccactccctctctgcgcgctcgctcgctcactgaggccgggcgaccaaaggtcgcccgacgcccgggctttgcccgggcggcctcagtgagcgagcgagcgcgcag

SEQ ID NO: 222 - DNA, 2696 bp, Artificial Sequence
  source: /note="Description of Artificial Sequence: Synthetic polynucleotide"
  modified_base (1449)..(1453): a, c, t, g, unknown or other
  modified_base (2282)..(2286): a, c, t, g, unknown or other
ctgcgcgctcgctcgctcactgaggccgcccgggcgtcgggcgacctttggtcgcccggcctcagtgagcgagcgagcgcgcagagagggagtggccaactccatcactaggggttcctgcggccgcacgcgtgacattgattattgactagttattaatagtaatcaattacggggtcattagttcatagcccatatatggagttccgcgttacataacttacggtaaatggcccgcctggctgaccgcccaacgacccccgcccattgacgtcaataatgacgtatgttcccatagtaacgccaatagggactttccattgacgtcaatgggtggactatttacggtaaactgcccacttggcagtacatcaagtgtatcatatgccaagtacgccccctattgacgtcaatgacggtaaatggcccgcctggcattatgcccagtacatgaccttatgggactttcctacttggcagtacatctacgtattagtcatcgctattaccatgggtcgaggtgagccccacgttctgcttcactctccccatctcccccccctccccacccccaattttgtatttatttattttttaattattttgtgcagcgatgggggcggggggggggggggcgcgcgccaggcggggcggggcggggcgaggggcggggcggggcgaggcggagaggtgcggcggcagccaatcagagcggcgcgctccgaaagtttccttttatggcgaggcggcggcggcggcggccctataaaaagcgaagcgcgcggcgggcgggagtcgctgcgttgccttcgccccgtgccccgctccgcgccgcctcgcgccgcccgccccggctctgactgaccgcgttactcccacaggtgagcgggcgggacggcccttctcctccgggctgtaattagcgcttggtttaatgacggctcgtttcttttctgtggctgcgtgaaagccttaaagggctccgggagggccctttgtgcgggggggagcggctcggggggtgcgtgcgtgtgtgtgtgcgtggggagcgccgcgtgcggcccgcgctgcccggcggctgtgagcgctgcgggcgcggcgcggggctttgtgcgctccgcgtgtgcgcgaggggagcgcggccgggggcggtgccccgcggtgcgggggggctgcgaggggaacaaaggctgcgtgcggggtgtgtgcgtgggggggtgagcagggggtgtgggcgcggcggtcgggctgtaacccccccctgcacccccctccccgagttgctgagcacggcccggcttcgggtgcggggctccgtgcggggcgtggcgcggggctcgccgtgccgggcggggggtggcggcaggtgggggtgccgggcggggcggggccgcctcgggccggggagggctcgggggaggggcgcggcggcccccggagcgccggcgnnnnntctagagcctctgctaaccatgttcatgccttcttctttttcctacagctcctgggcaacgtgctggttattgtgaccggtcgctagccaccatggtgagcaagggcgaggagctgttcaccggggtggtgcccatcctggtcgagctggacggcgacgtaaacggccacaagttcagcgtgtccggcgagggcgagggcgatgccacctacggcaagctgaccctgaagttcatctgcaccaccggcaagctgcccgtgccctggcccaccctcgtgaccaccctgacctacggcgtgcagtgcttcagccgctaccccgaccacatgaagcagcacgacttcttcaagtccgccatgcccgaaggctacgtccaggagcgcaccatcttcttcaaggacgacggcaactacaagacccgcgccgaggtgaagttcgagggcgacaccctggtgaaccgcatcgagctgaagggcatcgacttcaaggaggacggcaacatcctggggcacaagctggagtacaactacaacagccacaacgtctatatcatggccgacaagcagaagaacggcatcaaggtgaacttcaagatccgccacaacatcgaggacggcagcgtgcagctcgccgaccactaccagcagaacacccccatcggcgacggccccgtgctgctgcccgacaaccactacctgagcacccagtccgccctgagcaaagaccccaacgagaagcgcgatcacatggtcctgctggagttcgtgaccgccgccgggatcactctcggcatggacgagctgtacaagtaacctgcaggcgccggcgnnnnngagctcgctgatcagcctcgactgtgccttctagttgccagccatctgttgtttgcccctcccccgtgccttccttgaccctggaaggtgccactcccactgtcctttcctaataaaatgaggaaattgcatcgcattgtctgagtaggtgtcattctattctggggggtggggtggggcaggacagcaagggggaggattgggaagacaatagcaggcatgctggggatgcggtgggctctatggaagcttgaattcagctgacgtgcctcggaccgctaggaacccctagtgatggagttggccactccctctctgcgcgctcgctcgctcactgaggccgggcgaccaaaggtcgcccgacgcccgggctttgcccgggcggcctcagtgagcgagcgagcgcgcag

SEQ ID NO: 223 - DNA, 2675 bp, Artificial Sequence
  source: /note="Description of Artificial Sequence: Synthetic polynucleotide"
  modified_base (1449)..(1453): a, c, t, g, unknown or other
ctgcgcgctcgctcgctcactgaggccgcccgggcgtcgggcgacctttggtcgcccggcctcagtgagcgagcgagcgcgcagagagggagtggccaactccatcactaggggttcctgcggccgcacgcgtgacattgattattgactagttattaatagtaatcaattacggggtcattagttcatagcccatatatggagttccgcgttacataacttacggtaaatggcccgcctggctgaccgcccaacgacccccgcccattgacgtcaataatgacgtatgttcccatagtaacgccaatagggactttccattgacgtcaatgggtggactatttacggtaaactgcccacttggcagtacatcaagtgtatcatatgccaagtacgccccctattgacgtcaatgacggtaaatggcccgcctggcattatgcccagtacatgaccttatgggactttcctacttggcagtacatctacgtattagtcatcgctattaccatgggtcgaggtgagccccacgttctgcttcactctccccatctcccccccctccccacccccaattttgtatttatttattttttaattattttgtgcagcgatgggggcggggggggggggggcgcgcgccaggcggggcggggcggggcgaggggcggggcggggcgaggcggagaggtgcggcggcagccaatcagagcggcgcgctccgaaagtttccttttatggcgaggcggcggcggcggcggccctataaaaagcgaagcgcgcggcgggcgggagtcgctgcgttgccttcgccccgtgccccgctccgcgccgcctcgcgccgcccgccccggctctgactgaccgcgttactcccacaggtgagcgggcgggacggcccttctcctccgggctgtaattagcgcttggtttaatgacggctcgtttcttttctgtggctgcgtgaaagccttaaagggctccgggagggccctttgtgcgggggggagcggctcggggggtgcgtgcgtgtgtgtgtgcgtggggagcgccgcgtgcggcccgcgctgcccggcggctgtgagcgctgcgggcgcggcgcggggctttgtgcgctccgcgtgtgcgcgaggggagcgcggccgggggcggtgccccgcggtgcgggggggctgcgaggggaacaaaggctgcgtgcggggtgtgtgcgtgggggggtgagcagggggtgtgggcgcggcggtcgggctgtaacccccccctgcacccccctccccgagttgctgagcacggcccggcttcgggtgcggggctccgtgcggggcgtggcgcggggctcgccgtgccgggcggggggtggcggcaggtgggggtgccgggcggggcggggccgcctcgggccggggagggctcgggggaggggcgcggcggcccccggagcgccggcgnnnnntctagagcctctgctaaccatgttcatgccttcttctttttcctacagctcctgggcaacgtgctggttattgtgaccggtcgctagccaccatggtgagcaagggcgaggagctgttcaccggggtggtgcccatcctggtcgagctggacggcgacgtaaacggccacaagttcagcgtgtccggcgagggcgagggcgatgccacctacggcaagctgaccctgaagttcatctgcaccaccggcaagctgcccgtgccctggcccaccctcgtgaccaccctgacctacggcgtgcagtgcttcagccgctaccccgaccacatgaagcagcacgacttcttcaagtccgccatgcccgaaggctacgtccaggagcgcaccatcttcttcaaggacgacggcaactacaagacccgcgccgaggtgaagttcgagggcgacaccctggtgaaccgcatcgagctgaagggcatcgacttcaaggaggacggcaacatcctggggcacaagctggagtacaactacaacagccacaacgtctatatcatggccgacaagcagaagaacggcatcaaggtgaacttcaagatccgccacaacatcgaggacggcagcgtgcagctcgccgaccactaccagcagaacacccccatcggcgacggccccgtgctgctgcccgacaaccactacctgagcacccagtccgccctgagcaaagaccccaacgagaagcgcgatcacatggtcctgctggagttcgtgaccgccgccgggatcactctcggcatggacgagctgtacaagtaagagctcgctgatcagcctcgactgtgccttctagttgccagccatctgttgtttgcccctcccccgtgccttccttgaccctggaaggtgccactcccactgtcctttcctaataaaatgaggaaattgcatcgcattgtctgagtaggtgtcattctattctggggggtggggtggggcaggacagcaagggggaggattgggaagacaatagcaggcatgctggggatgcggtgggctctatggaagcttgaattcagctgacgtgcctcggaccgctaggaacccctagtgatggagttggccactccctctctgcgcgctcgctcgctcactgaggccgggcgaccaaaggtcgcccgacgcccgggctttgcccgggcggcctcagtgagcgagcgagcgcgcag

SEQ ID NO: 224 - DNA, 2983 bp, Artificial Sequence
  source: /note="Description of Artificial Sequence: Synthetic polynucleotide"
  modified_base (2569)..(2573): a, c, t, g, unknown or other
ctgcgcgctcgctcgctcactgaggccgcccgggcgtcgggcgacctttggtcgcccggcctcagtgagcgagcgagcgcgcagagagggagtggccaactccatcactaggggttcctgcggccgcacgcgtgacattgattattgactagttattaatagtaatcaattacggggtcattagttcatagcccatatatggagttccgcgttacataacttacggtaaatggcccgcctggctgaccgcccaacgacccccgcccattgacgtcaataatgacgtatgttcccatagtaacgccaatagggactttccattgacgtcaatgggtggactatttacggtaaactgcccacttggcagtacatcaagtgtatcatatgccaagtacgccccctattgacgtcaatgacggtaaatggcccgcctggcattatgcccagtacatgaccttatgggactttcctacttggcagtacatctacgtattagtcatcgctattaccatgggtcgaggtgagccccacgttctgcttcactctccccatctcccccccctccccacccccaattttgtatttatttattttttaattattttgtgcagcgatgggggcggggggggggggggcgcgcgccaggcggggcggggcggggcgaggggcggggcggggcgaggcggagaggtgcggcggcagccaatcagagcggcgcgctccgaaagtttccttttatggcgaggcggcggcggcggcggccctataaaaagcgaagcgcgcggcgggcgggagtcgctgcgttgccttcgccccgtgccccgctccgcgccgcctcgcgccgcccgccccggctctgactgaccgcgttactcccacaggtgagcgggcgggacggcccttctcctccgggctgtaattagcgcttggtttaatgacggctcgtttcttttctgtggctgcgtgaaagccttaaagggctccgggagggccctttgtgcgggggggagcggctcggggggtgcgtgcgtgtgtgtgtgcgtggggagcgccgcgtgcggcccgcgctgcccggcggctgtgagcgctgcgggcgcggcgcggggctttgtgcgctccgcgtgtgcgcgaggggagcgcggccgggggcggtgccccgcggtgcgggggggctgcgaggggaacaaaggctgcgtgcggggtgtgtgcgtgggggggtgagcagggggtgtgggcgcggcggtcgggctgtaacccccccctgcacccccctccccgagttgctgagcacggcccggcttcgggtgcggggctccgtgcggggcgtggcgcggggctcgccgtgccgggcggggggtggcggcaggtgggggtgccgggcggggcggggccgcctcgggccggggagggctcgggggaggggcgcggcggcccccggagcgccggcggctgtcgaggcgcggcgagccgcagccattgccttttatggtaatcgtgcgagagggcgcagggacttcctttgtcccaaatctgtgcggagccgaaatctgggaggcgccgccgcaccccctctagcgggcgcggggcgaagcggtgcggcgccggcaggaaggaaatgggcggggagggccttcgtgcgtcgccgcgccgccgtccccttctccctctccagcctcggggctgtccgcggggggacggctgccttcgggggggacggggcagggcggggttcggcttctggcgtgtgaccggcggctctagagcctctgctaaccatgttcatgccttcttctttttcctacagctcctgggcaacgtgctggttattgtgaccggtcgctagccaccatggtgagcaagggcgaggagctgttcaccggggtggtgcccatcctggtcgagctggacggcgacgtaaacggccacaagttcagcgtgtccggcgagggcgagggcgatgccacctacggcaagctgaccctgaagttcatctgcaccaccggcaagctgcccgtgccctggcccaccctcgtgaccaccctgacctacggcgtgcagtgcttcagccgctaccccgaccacatgaagcagcacgacttcttcaagtccgccatgcccgaaggctacgtccaggagcgcaccatcttcttcaaggacgacggcaactacaagacccgcgccgaggtgaagttcgagggcgacaccctggtgaaccgcatcgagctgaagggcatcgacttcaaggaggacggcaacatcctggggcacaagctggagtacaactacaacagccacaacgtctatatcatggccgacaagcagaagaacggcatcaaggtgaacttcaagatccgccacaacatcgaggacggcagcgtgcagctcgccgaccactaccagcagaacacccccatcggcgacggccccgtgctgctgcccgacaaccactacctgagcacccagtccgccctgagcaaagaccccaacgagaagcgcgatcacatggtcctgctggagttcgtgaccgccgccgggatcactctcggcatggacgagctgtacaagtaannnnngagctcgctgatcagcctcgactgtgccttctagttgccagccatctgttgtttgcccctcccccgtgccttccttgaccctggaaggtgccactcccactgtcctttcctaataaaatgaggaaattgcatcgcattgtctgagtaggtgtcattctattctggggggtggggtggggcaggacagcaagggggaggattgggaagacaatagcaggcatgctggggatgcggtgggctctatggaagcttgaattcagctgacgtgcctcggaccgctaggaacccctagtgatggagttggccactccctctctgcgcgctcgctcgctcactgaggccgggcgaccaaaggtcgcccgacgcccgggctttgcccgggcggcctcagtgagcgagcgagcgcgcag

SEQ ID NO: 225 - DNA, 2963 bp, Artificial Sequence
  source: /note="Description of Artificial Sequence: Synthetic polynucleotide"
cctgcaggcagctgcgcgctcgctcgctcactgaggccgcccgggcgtcgggcgacctttggtcgcccggcctcagtgagcgagcgagcgcgcagagagggagtggccaactccatcactaggggttcctgcggccgcacgcgtgacattgattattgactagttattaatagtaatcaattacggggtcattagttcatagcccatatatggagttccgcgttacataacttacggtaaatggcccgcctggctgaccgcccaacgacccccgcccattgacgtcaataatgacgtatgttcccatagtaacgccaatagggactttccattgacgtcaatgggtggactatttacggtaaactgcccacttggcagtacatcaagtgtatcatatgccaagtacgccccctattgacgtcaatgacggtaaatggcccgcctggcattatgcccagtacatgaccttatgggactttcctacttggcagtacatctacgtattagtcatcgctattaccatgggtcgaggtgagccccacgttctgcttcactctccccatctcccccccctccccacccccaattttgtatttatttattttttaattattttgtgcagcgatgggggcggggggggggggggcgcgcgccaggcggggcggggcggggcgaggggcggggcggggcgaggcggagaggtgcggcggcagccaatcagagcggcgcgctccgaaagtttccttttatggcgaggcggcggcggcggcggccctataaaaagcgaagcgcgcggcgggcgggagtcgctgcgttgccttcgccccgtgccccgctccgcgccgcctcgcgccgcccgccccggctctgactgaccgcgttactcccacaggtgagcgggcgggacggcccttctcctccgggctgtaattagcgcttggtttaatgacggctcgtttcttttctgtggctgcgtgaaagccttaaagggctccgggagggccctttgtgcgggggggagcggctcggggggtgcgtgcgtgtgtgtgtgcgtggggagcgccgcgtgcggcccgcgctgcccggcggctgtgagcgctgcgggcgcggcgcggggctttgtgcgctccgcgtgtgcgcgaggggagcgcggccgggggcggtgccccgcggtgcgggggggctgcgaggggaacaaaggctgcgtgcggggtgtgtgcgtgggggggtgagcagggggtgtgggcgcggcggtcgggctgtaacccccccctgcacccccctccccgagttgctgagcacggcccggcttcgggtgcggggctccgtgcggggcgtggcgcggggctcgccgtgccgggcggggggtggcggcaggtgggggtgccgggcggggcggggccgcctcgggccggggagggctcgggggaggggcgcggcggcccccggagcgccggcgtcctctgagtgctgaaggcttgctgtaggctgtatgctgttgagaatcctgatggagcgggtttttgcctccaactgacccgctcataggattctcaacagtgtatgatgcctgttactagcattcacatggatctagagcctctgctaaccatgttcatgccttcttctttttcctacagctcctgggcaacgtgctggttattgtgaccggtcgctagccaccatggtgagcaagggcgaggagctgttcaccggggtggtgcccatcctggtcgagctggacggcgacgtaaacggccacaagttcagcgtgtccggcgagggcgagggcgatgccacctacggcaagctgaccctgaagttcatctgcaccaccggcaagctgcccgtgccctggcccaccctcgtgaccaccctgacctacggcgtgcagtgcttcagccgctaccccgaccacatgaagcagcacgacttcttcaagtccgccatgcccgaaggctacgtccaggagcgcaccatcttcttcaaggacgacggcaactacaagacccgcgccgaggtgaagttcgagggcgacaccctggtgaaccgcatcgagctgaagggcatcgacttcaaggaggacggcaacatcctggggcacaagctggagtacaactacaacagccacaacgtctatatcatggccgacaagcagaagaacggcatcaaggtgaacttcaagatccgccacaacatcgaggacggcagcgtgcagctcgccgaccactaccagcagaacacccccatcggcgacggccccgtgctgctgcccgacaaccactacctgagcacccagtccgccctgagcaaagaccccaacgagaagcgcgatcacatggtcctgctggagttcgtgaccgccgccgggatcactctcggcatggacgagctgtacaagtaacctgcaggcgccggcgtcctctgagtgctgaaggcttgctgtaggctgtatgctgttgagaatcctgatggagcgggtttttgcctccaactgacccgctcataggattctcaacagtgtatgatgcctgttactagcattcacatggagagctcgctgatcagcctcgactgtgccttctagttgccagccatctgttgtttgcccctcccccgtgccttccttgaccctggaaggtgccactcccactgtcctttcctaataaaatgaggaaattgcatcgcattgtctgagtaggtgtcattctattctggggggtggggtggggcaggacagcaagggggaggattgggaagacaatagcaggcatgctggggatgcggtgggctctatggaagcttgaattcagctgacgtgcctcggaccgctaggaacccctagtgatggagttggccactccctctctgcgcgctcgctcgctcactgaggccgggcgaccaaaggtcgcccgacgcccgggctttgcccgggcggcctcagtgagcgagcgagcgcgcag

SEQ ID NO: 226 - DNA, 2814 bp, Artificial Sequence
  source: /note="Description of Artificial Sequence: Synthetic polynucleotide"
cctgcaggcagctgcgcgctcgctcgctcactgaggccgcccgggcgtcgggcgacctttggtcgcccggcctcagtgagcgagcgagcgcgcagagagggagtggccaactccatcactaggggttcctgcggccgcacgcgtgacattgattattgactagttattaatagtaatcaattacggggtcattagttcatagcccatatatggagttccgcgttacataacttacggtaaatggcccgcctggctgaccgcccaacgacccccgcccattgacgtcaataatgacgtatgttcccatagtaacgccaatagggactttccattgacgtcaatgggtggactatttacggtaaactgcccacttggcagtacatcaagtgtatcatatgccaagtacgccccctattgacgtcaatgacggtaaatggcccgcctggcattatgcccagtacatgaccttatgggactttcctacttggcagtacatctacgtattagtcatcgctattaccatgggtcgaggtgagccccacgttctgcttcactctccccatctcccccccctccccacccccaattttgtatttatttattttttaattattttgtgcagcgatgggggcggggggggggggggcgcgcgccaggcggggcggggcggggcgaggggcggggcggggcgaggcggagaggtgcggcggcagccaatcagagcggcgcgctccgaaagtttccttttatggcgaggcggcggcggcggcggccctataaaaagcgaagcgcgcggcgggcgggagtcgctgcgttgccttcgccccgtgccccgctccgcgccgcctcgcgccgcccgccccggctctgactgaccgcgttactcccacaggtgagcgggcgggacggcccttctcctccgggctgtaattagcgcttggtttaatgacggctcgtttcttttctgtggctgcgtgaaagccttaaagggctccgggagggccctttgtgcgggggggagcggctcggggggtgcgtgcgtgtgtgtgtgcgtggggagcgccgcgtgcggcccgcgctgcccggcggctgtgagcgctgcgggcgcggcgcggggctttgtgcgctccgcgtgtgcgcgaggggagcgcggccgggggcggtgccccgcggtgcgggggggctgcgaggggaacaaaggctgcgtgcggggtgtgtgcgtgggggggtgagcagggggtgtgggcgcggcggtcgggctgtaacccccccctgcacccccctccccgagttgctgagcacggcccggcttcgggtgcggggctccgtgcggggcgtggcgcggggctcgccgtgccgggcggggggtggcggcaggtgggggtgccgggcggggcggggccgcctcgggccggggagggctcgggggaggggcgcggcggcccccggagcgccggcgtcctctgagtgctgaaggcttgctgtaggctgtatgctgttgagaatcctgatggagcgggtttttgcctccaactgacccgctcataggattctcaacagtgtatgatgcctgttactagcattcacatggatctagagcctctgctaaccatgttcatgccttcttctttttcctacagctcctgggcaacgtgctggttattgtgaccggtcgctagccaccatggtgagcaagggcgaggagctgttcaccggggtggtgcccatcctggtcgagctggacggcgacgtaaacggccacaagttcagcgtgtccggcgagggcgagggcgatgccacctacggcaagctgaccctgaagttcatctgcaccaccggcaagctgcccgtgccctggcccaccctcgtgaccaccctgacctacggcgtgcagtgcttcagccgctaccccgaccacatgaagcagcacgacttcttcaagtccgccatgcccgaaggctacgtccaggagcgcaccatcttcttcaaggacgacggcaactacaagacccgcgccgaggtgaagttcgagggcgacaccctggtgaaccgcatcgagctgaagggcatcgacttcaaggaggacggcaacatcctggggcacaagctggagtacaactacaacagccacaacgtctatatcatggccgacaagcagaagaacggcatcaaggtgaacttcaagatccgccacaacatcgaggacggcagcgtgcagctcgccgaccactaccagcagaacacccccatcggcgacggccccgtgctgctgcccgacaaccactacctgagcacccagtccgccctgagcaaagaccccaacgagaagcgcgatcacatggtcctgctggagttcgtgaccgccgccgggatcactctcggcatggacgagctgtacaagtaagagctcgctgatcagcctcgactgtgccttctagttgccagccatctgttgtttgcccctcccccgtgccttccttgaccctggaaggtgccactcccactgtcctttcctaataaaatgaggaaattgcatcgcattgtctgagtaggtgtcattctattctggggggtggggtggggcaggacagcaagggggaggattgggaagacaatagcaggcatgctggggatgcggtgggctctatggaagcttgaattcagctgacgtgcctcggaccgctaggaacccctagtgatggagttggccactccctctctgcgcgctcgctcgctcactgaggccgggcgaccaaaggtcgcccgacgcccgggctttgcccgggcggcctcagtgagcgagcgagcgcgcag

SEQ ID NO: 227 - DNA, 3138 bp, Artificial Sequence
  source: /note="Description of Artificial Sequence: Synthetic polynucleotide"
cctgcaggcagctgcgcgctcgctcgctcactgaggccgcccgggcgtcgggcgacctttggtcgcccggcctcagtgagcgagcgagcgcgcagagagggagtggccaactccatcactaggggttcctgcggccgcacgcgtgacattgattattgactagttattaatagtaatcaattacggggtcattagttcatagcccatatatggagttccgcgttacataacttacggtaaatggcccgcctggctgaccgcccaacgacccccgcccattgacgtcaataatgacgtatgttcccatagtaacgccaatagggactttccattgacgtcaatgggtggactatttacggtaaactgcccacttggcagtacatcaagtgtatcatatgccaagtacgccccctattgacgtcaatgacggtaaatggcccgcctggcattatgcccagtacatgaccttatgggactttcctacttggcagtacatctacgtattagtcatcgctattaccatgggtcgaggtgagccccacgttctgcttcactctccccatctcccccccctccccacccccaattttgtatttatttattttttaattattttgtgcagcgatgggggcggggggggggggggcgcgcgccaggcggggcggggcggggcgaggggcggggcggggcgaggcggagaggtgcggcggcagccaatcagagcggcgcgctccgaaagtttccttttatggcgaggcggcggcggcggcggccctataaaaagcgaagcgcgcggcgggcgggagtcgctgcgttgccttcgccccgtgccccgctccgcgccgcctcgcgccgcccgccccggctctgactgaccgcgttactcccacaggtgagcgggcgggacggcccttctcctccgggctgtaattagcgcttggtttaatgacggctcgtttcttttctgtggctgcgtgaaagccttaaagggctccgggagggccctttgtgcgggggggagcggctcggggggtgcgtgcgtgtgtgtgtgcgtggggagcgccgcgtgcggcccgcgctgcccggcggctgtgagcgctgcgggcgcggcgcggggctttgtgcgctccgcgtgtgcgcgaggggagcgcggccgggggcggtgccccgcggtgcgggggggctgcgaggggaacaaaggctgcgtgcggggtgtgtgcgtgggggggtgagcagggggtgtgggcgcggcggtcgggctgtaacccccccctgcacccccctccccgagttgctgagcacggcccggcttcgggtgcggggctccgtgcggggcgtggcgcggggctcgccgtgccgggcggggggtggcggcaggtgggggtgccgggcggggcggggccgcctcgggccggggagggctcgggggaggggcgcggcggcccccggagcgccggcggctgtcgaggcgcggcgagccgcagccattgccttttatggtaatcgtgcgagagggcgcagggacttcctttgtcccaaatctgtgcggagccgaaatctgggaggcgccgccgcaccccctctagcgggcgcggggcgaagcggtgcggcgccggcaggaaggaaatgggcggggagggccttcgtgcgtcgccgcgccgccgtccccttctccctctccagcctcggggctgtccgcggggggacggctgccttcgggggggacggggcagggcggggttcggcttctggcgtgtgaccggcggctctagagcctctgctaaccatgttcatgccttcttctttttcctacagctcctgggcaacgtgctggttattgtgaccggtcgctagccaccatggtgagcaagggcgaggagctgttcaccggggtggtgcccatcctggtcgagctggacggcgacgtaaacggccacaagttcagcgtgtccggcgagggcgagggcgatgccacctacggcaagctgaccctgaagttcatctgcaccaccggcaagctgcccgtgccctggcccaccctcgtgaccaccctgacctacggcgtgcagtgcttcagccgctaccccgaccacatgaagcagcacgacttcttcaagtccgccatgcccgaaggctacgtccaggagcgcaccatcttcttcaaggacgacggcaactacaagacccgcgccgaggtgaagttcgagggcgacaccctggtgaaccgcatcgagctgaagggcatcgacttcaaggaggacggcaacatcctggggcacaagctggagtacaactacaacagccacaacgtctatatcatggccgacaagcagaagaacggcatcaaggtgaacttcaagatccgccacaacatcgaggacggcagcgtgcagctcgccgaccactaccagcagaacacccccatcggcgacggccccgtgctgctgcccgacaaccactacctgagcacccagtccgccctgagcaaagaccccaacgagaagcgcgatcacatggtcctgctggagttcgtgaccgccgccgggatcactctcggcatggacgagctgtacaagtaacctgcaggcgccggcgtcctctgagtgctgaaggcttgctgtaggctgtatgctgttgagaatcctgatggagcgggtttttgcctccaactgacccgctcataggattctcaacagtgtatgatgcctgttactagcattcacatggagagctcgctgatcagcctcgactgtgccttctagttgccagccatctgttgtttgcccctcccccgtgccttccttgaccctggaaggtgccactcccactgtcctttcctaataaaatgaggaaattgcatcgcattgtctgagtaggtgtcattctattctggggggtggggtggggcaggacagcaagggggaggattgggaagacaatagcaggcatgctggggatgcggtgggctctatggaagcttgaattcagctgacgtgcctcggaccgctaggaacccctagtgatggagttggccactccctctctgcgcgctcgctcgctcactgaggccgggcgaccaaaggtcgcccgacgcccgggctttgcccgggcggcctcagtgagcgagcgagcgcgcag

SEQ ID NO: 228 - DNA, 2963 bp, Artificial Sequence
  source: /note="Description of Artificial Sequence: Synthetic polynucleotide"
cctgcaggcagctgcgcgctcgctcgctcactgaggccgcccgggcgtcgggcgacctttggtcgcccggcctcagtgagcgagcgagcgcgcagagagggagtggccaactccatcactaggggttcctgcggccgcacgcgtgacattgattattgactagttattaatagtaatcaattacggggtcattagttcatagcccatatatggagttccgcgttacataacttacggtaaatggcccgcctggctgaccgcccaacgacccccgcccattgacgtcaataatgacgtatgttcccatagtaacgccaatagggactttccattgacgtcaatgggtggactatttacggtaaactgcccacttggcagtacatcaagtgtatcatatgccaagtacgccccctattgacgtcaatgacggtaaatggcccgcctggcattatgcccagtacatgaccttatgggactttcctacttggcagtacatctacgtattagtcatcgctattaccatgggtcgaggtgagccccacgttctgcttcactctccccatctcccccccctccccacccccaattttgtatttatttattttttaattattttgtgcagcgatgggggcggggggggggggggcgcgcgccaggcggggcggggcggggcgaggggcggggcggggcgaggcggagaggtgcggcggcagccaatcagagcggcgcgctccgaaagtttccttttatggcgaggcggcggcggcggcggccctataaaaagcgaagcgcgcggcgggcgggagtcgctgcgttgccttcgccccgtgccccgctccgcgccgcctcgcgccgcccgccccggctctgactgaccgcgttactcccacaggtgagcgggcgggacggcccttctcctccgggctgtaattagcgcttggtttaatgacggctcgtttcttttctgtggctgcgtgaaagccttaaagggctccgggagggccctttgtgcgggggggagcggctcggggggtgcgtgcgtgtgtgtgtgcgtggggagcgccgcgtgcggcccgcgctgcccggcggctgtgagcgctgcgggcgcggcgcggggctttgtgcgctccgcgtgtgcgcgaggggagcgcggccgggggcggtgccccgcggtgcgggggggctgcgaggggaacaaaggctgcgtgcggggtgtgtgcgtgggggggtgagcagggggtgtgggcgcggcggtcgggctgtaacccccccctgcacccccctccccgagttgctgagcacggcccggcttcgggtgcggggctccgtgcggggcgtggcgcggggctcgccgtgccgggcggggggtggcggcaggtgggggtgccgggcggggcggggccgcctcgggccggggagggctcgggggaggggcgcggcggcccccggagcgccggcgtcctctgagtgctgaaggcttgctgtaggctgtatgctgttgagtctcagagatgcccgggtttttgcctccaactgactcgggattctgagactcaacagtgtatgatgcctgttactagcattcacatggatctagagcctctgctaaccatgttcatgccttcttctttttcctacagctcctgggcaacgtgctggttattgtgaccggtcgctagccaccatggtgagcaagggcgaggagctgttcaccggggtggtgcccatcctggtcgagctggacggcgacgtaaacggccacaagttcagcgtgtccggcgagggcgagggcgatgccacctacggcaagctgaccctgaagttcatctgcaccaccggcaagctgcccgtgccctggcccaccctcgtgaccaccctgacctacggcgtgcagtgcttcagccgctaccccgaccacatgaagcagcacgacttcttcaagtccgccatgcccgaaggctacgtccaggagcgcaccatcttcttcaaggacgacggcaactacaagacccgcgccgaggtgaagttcgagggcgacaccctggtgaaccgcatcgagctgaagggcatcgacttcaaggaggacggcaacatcctggggcacaagctggagtacaactacaacagccacaacgtctatatcatggccgacaagcagaagaacggcatcaaggtgaacttcaagatccgccacaacatcgaggacggcagcgtgcagctcgccgaccactaccagcagaacacccccatcggcgacggccccgtgctgctgcccgacaaccactacctgagcacccagtccgccctgagcaaagaccccaacgagaagcgcgatcacatggtcctgctggagttcgtgaccgccgccgggatcactctcggcatggacgagctgtacaagtaacctgcaggcgccggcgtcctctgagtgctgaaggcttgctgtaggctgtatgctgttgagtctcagagatgcccgggtttttgcctccaactgactcgggattctgagactcaacagtgtatgatgcctgttactagcattcacatggagagctcgctgatcagcctcgactgtgccttctagttgccagccatctgttgtttgcccctcccccgtgccttccttgaccctggaaggtgccactcccactgtcctttcctaataaaatgaggaaattgcatcgcattgtctgagtaggtgtcattctattctggggggtggggtggggcaggacagcaagggggaggattgggaagacaatagcaggcatgctggggatgcggtgggctctatggaagcttgaattcagctgacgtgcctcggaccgctaggaacccctagtgatggagttggccactccctctctgcgcgctcgctcgctcactgaggccgggcgaccaaaggtcgcccgacgcccgggctttgcccgggcggcctcagtgagcgagcgagcgcgcag

SEQ ID NO: 229 - DNA, 2963 bp, Artificial Sequence
  source: /note="Description of Artificial Sequence: Synthetic polynucleotide"
cctgcaggcagctgcgcgctcgctcgctcactgaggccgcccgggcgtcgggcgacctttggtcgcccggcctcagtgagcgagcgagcgcgcagagagggagtggccaactccatcactaggggttcctgcggccgcacgcgtgacattgattattgactagttattaatagtaatcaattacggggtcattagttcatagcccatatatggagttccgcgttacataacttacggtaaatggcccgcctggctgaccgcccaacgacccccgcccattgacgtcaataatgacgtatgttcccatagtaacgccaatagggactttccattgacgtcaatgggtggactatttacggtaaactgcccacttggcagtacatcaagtgtatcatatgccaagtacgccccctattgacgtcaatgacggtaaatggcccgcctggcattatgcccagtacatgaccttatgggactttcctacttggcagtacatctacgtattagtcatcgctattaccatgggtcgaggtgagccccacgttctgcttcactctccccatctcccccccctccccacccccaattttgtatttatttattttttaattattttgtgcagcgatgggggcggggggggggggggcgcgcgccaggcggggcggggcggggcgaggggcggggcggggcgaggcggagaggtgcggcggcagccaatcagagcggcgcgctccgaaagtttccttttatggcgaggcggcggcggcggcggccctataaaaagcgaagcgcgcggcgggcgggagtcgctgcgttgccttcgccccgtgccccgctccgcgccgcctcgcgccgcccgccccggctctgactgaccgcgttactcccacaggtgagcgggcgggacggcccttctcctccgggctgtaattagcgcttggtttaatgacggctcgtttcttttctgtggctgcgtgaaagccttaaagggctccgggagggccctttgtgcgggggggagcggctcggggggtgcgtgcgtgtgtgtgtgcgtggggagcgccgcgtgcggcccgcgctgcccggcggctgtgagcgctgcgggcgcggcgcggggctttgtgcgctccgcgtgtgcgcgaggggagcgcggccgggggcggtgccccgcggtgcgggggggctgcgaggggaacaaaggctgcgtgcggggtgtgtgcgtgggggggtgagcagggggtgtgggcgcggcggtcgggctgtaacccccccctgcacccccctccccgagttgctgagcacggcccggcttcgggtgcggggctccgtgcggggcgtggcgcggggctcgccgtgccgggcggggggtggcggcaggtgggggtgccgggcggggcggggccgcctcgggccggggagggctcgggggaggggcgcggcggcccccggagcgccggcgtcctctgagtgctgaaggcttgctgtaggctgtatgctgttgagtctcagagatgcccgggtttttgcctccaactgactcgggattctgagattcaacagtgtatgatgcctgttactagcattcacatggatctagagcctctgctaaccatgttcatgccttcttctttttcctacagctcctgggcaacgtgctggttattgtgaccggtcgctagccaccatggtgagcaagggcgaggagctgttcaccggggtggtgcccatcctggtcgagctggacggcgacgtaaacggccacaagttcagcgtgtccggcgagggcgagggcgatgccacctacggcaagctgaccctgaagttcatctgcaccaccggcaagctgcccgtgccctggcccaccctcgtgaccaccctgacctacggcgtgcagtgcttcagccgctaccccgaccacatgaagcagcacgacttcttcaagtccgccatgcccgaaggctacgtccaggagcgcaccatcttcttcaaggacgacggcaactacaagacccgcgccgaggtgaagttcgagggcgacaccctggtgaaccgcatcgagctgaagggcatcgacttcaaggaggacggcaacatcctggggcacaagctggagtacaactacaacagccacaacgtctatatcatggccgacaagcagaagaacggcatcaaggtgaacttcaagatccgccacaacatcgaggacggcagcgtgcagctcgccgaccactaccagcagaacacccccatcggcgacggccccgtgctgctgcccgacaaccactacctgagcacccagtccgccctgagcaaagaccccaacgagaagcgcgatcacatggtcctgctggagttcgtgaccgccgccgggatcactctcggcatggacgagctgtacaagtaacctgcaggcgccggcgtcctctgagtgctgaaggcttgctgtaggctgtatgctgttgagtctcagagatgcccgggtttttgcctccaactgactcgggattctgagattcaacagtgtatgatgcctgttactagcattcacatggagagctcgctgatcagcctcgactgtgccttctagttgccagccatctgttgtttgcccctcccccgtgccttccttgaccctggaaggtgccactcccactgtcctttcctaataaaatgaggaaattgcatcgcattgtctgagtaggtgtcattctattctggggggtggggtggggcaggacagcaagggggaggattgggaagacaatagcaggcatgctggggatgcggtgggctctatggaagcttgaattcagctgacgtgcctcggaccgctaggaacccctagtgatggagttggccactccctctctgcgcgctcgctcgctcactgaggccgggcgaccaaaggtcgcccgacgcccgggctttgcccgggcggcctcagtgagcgagcgagcgcgcag

SEQ ID NO: 230 - DNA, 2963 bp, Artificial Sequence
  source: /note="Description of Artificial Sequence: Synthetic polynucleotide"
cctgcaggcagctgcgcgctcgctcgctcactgaggccgcccgggcgtcgggcgacctttggtcgcccggcctcagtgagcgagcgagcgcgcagagagggagtggccaactccatcactaggggttcctgcggccgcacgcgtgacattgattattgactagttattaatagtaatcaattacggggtcattagttcatagcccatatatggagttccgcgttacataacttacggtaaatggcccgcctggctgaccgcccaacgacccccgcccattgacgtcaataatgacgtatgttcccatagtaacgccaatagggactttccattgacgtcaatgggtggactatttacggtaaactgcccacttggcagtacatcaagtgtatcatatgccaagtacgccccctattgacgtcaatgacggtaaatggcccgcctggcattatgcccagtacatgaccttatgggactttcctacttggcagtacatctacgtattagtcatcgctattaccatgggtcgaggtgagccccacgttctgcttcactctccccatctcccccccctccccacccccaattttgtatttatttattttttaattattttgtgcagcgatgggggcggggggggggggggcgcgcgccaggcggggcggggcggggcgaggggcggggcggggcgaggcggagaggtgcggcggcagccaatcagagcggcgcgctccgaaagtttccttttatggcgaggcggcggcggcggcggccctataaaaagcgaagcgcgcggcgggcgggagtcgctgcgttgccttcgccccgtgccccgctccgcgccgcctcgcgccgcccgccccggctctgactgaccgcgttactcccacaggtgagcgggcgggacggcccttctcctccgggctgtaattagcgcttggtttaatgacggctcgtttcttttctgtggctgcgtgaaagccttaaagggctccgggagggccctttgtgcgggggggagcggctcggggggtgcgtgcgtgtgtgtgtgcgtggggagcgccgcgtgcggcccgcgctgcccggcggctgtgagcgctgcgggcgcggcgcggggctttgtgcgctccgcgtgtgcgcgaggggagcgcggccgggggcggtgccccgcggtgcgggggggctgcgaggggaacaaaggctgcgtgcggggtgtgtgcgtgggggggtgagcagggggtgtgggcgcggcggtcgggctgtaacccccccctgcacccccctccccgagttgctgagcacggcccggcttcgggtgcggggctccgtgcggggcgtggcgcggggctcgccgtgccgggcggggggtggcggcaggtgggggtgccgggcggggcggggccgcctcgggccggggagggctcgggggaggggcgcggcggcccccggagcgccggcgtcctctgagtgctgaaggcttgctgtaggctgtatgctgttgagtctcagagatgcccgggtttttgcctccaactgactcgggatcctgagattcaacagtgtatgatgcctgttactagcattcacatggatctagagcctctgctaaccatgttcatgccttcttctttttcctacagctcctgggcaacgtgctggttattgtgaccggtcgctagccaccatggtgagcaagggcgaggagctgttcaccggggtggtgcccatcctggtcgagctggacggcgacgtaaacggccacaagttcagcgtgtccggcgagggcgagggcgatgccacctacggcaagctgaccctgaagttcatctgcaccaccggcaagctgcccgtgccctggcccaccctcgtgaccaccctgacctacggcgtgcagtgcttcagccgctaccccgaccacatgaagcagcacgacttcttcaagtccgccatgcccgaaggctacgtccaggagcgcaccatcttcttcaaggacgacggcaactacaagacccgcgccgaggtgaagttcgagggcgacaccctggtgaaccgcatcgagctgaagggcatcgacttcaaggaggacggcaacatcctggggcacaagctggagtacaactacaacagccacaacgtctatatcatggccgacaagcagaagaacggcatcaaggtgaacttcaagatccgccacaacatcgaggacggcagcgtgcagctcgccgaccactaccagcagaacacccccatcggcgacggccccgtgctgctgcccgacaaccactacctgagcacccagtccgccctgagcaaagaccccaacgagaagcgcgatcacatggtcctgctggagttcgtgaccgccgccgggatcactctcggcatggacgagctgtacaagtaacctgcaggcgccggcgtcctctgagtgctgaaggcttgctgtaggctgtatgctgttgagtctcagagatgcccgggtttttgcctccaactgactcgggatcctgagattcaacagtgtatgatgcctgttactagcattcacatggagagctcgctgatcagcctcgactgtgccttctagttgccagccatctgttgtttgcccctcccccgtgccttccttgaccctggaaggtgccactcccactgtcctttcctaataaaatgaggaaattgcatcgcattgtctgagtaggtgtcattctattctggggggtggggtggggcaggacagcaagggggaggattgggaagacaatagcaggcatgctggggatgcggtgggctctatggaagcttgaattcagctgacgtgcctcggaccgctaggaacccctagtgatggagttggccactccctctctgcgcgctcgctcgctcactgaggccgggcgaccaaaggtcgcccgacgcccgggctttgcccgggcggcctcagtgagcgagcgagcgcgcag

SEQ ID NO: 231 - DNA, 2963 bp, Artificial Sequence
  source: /note="Description of Artificial Sequence: Synthetic polynucleotide"
cctgcaggcagctgcgcgctcgctcgctcactgaggccgcccgggcgtcgggcgacctttggtcgcccggcctcagtgagcgagcgagcgcgcagagagggagtggccaactccatcactaggggttcctgcggccgcacgcgtgacattgattattgactagttattaatagtaatcaattacggggtcattagttcatagcccatatatggagttccgcgttacataacttacggtaaatggcccgcctggctgaccgcccaacgacccccgcccattgacgtcaataatgacgtatgttcccatagtaacgccaatagggactttccattgacgtcaatgggtggactatttacggtaaactgcccacttggcagtacatcaagtgtatcatatgccaagtacgccccctattgacgtcaatgacggtaaatggcccgcctggcattatgcccagtacatgaccttatgggactttcctacttggcagtacatctacgtattagtcatcgctattaccatgggtcgaggtgagccccacgttctgcttcactctccccatctcccccccctccccacccccaattttgtatttatttattttttaattattttgtgcagcgatgggggcggggggggggggggcgcgcgccaggcggggcggggcggggcgaggggcggggcggggcgaggcggagaggtgcggcggcagccaatcagagcggcgcgctccgaaagtttccttttatggcgaggcggcggcggcggcggccctataaaaagcgaagcgcgcggcgggcgggagtcgctgcgttgccttcgccccgtgccccgctccgcgccgcctcgcgccgcccgccccggctctgactgaccgcgttactcccacaggtgagcgggcgggacggcccttctcctccgggctgtaattagcgcttggtttaatgacggctcgtttcttttctgtggctgcgtgaaagccttaaagggctccgggagggccctttgtgcgggggggagcggctcggggggtgcgtgcgtgtgtgtgtgcgtggggagcgccgcgtgcggcccgcgctgcccggcggctgtgagcgctgcgggcgcggcgcggggctttgtgcgctccgcgtgtgcgcgaggggagcgcggccgggggcggtgccccgcggtgcgggggggctgcgaggggaacaaaggctgcgtgcggggtgtgtgcgtgggggggtgagcagggggtgtgggcgcggcggtcgggctgtaacccccccctgcacccccctccccgagttgctgagcacggcccggcttcgggtgcggggctccgtgcggggcgtggcgcggggctcgccgtgccgggcggggggtggcggcaggtgggggtgccgggcggggcggggccgcctcgggccggggagggctcgggggaggggcgcggcggcccccggagcgccggcgtcctctgagtgctgaaggcttgctgtaggctgtatgctgttgagtctcagagatgcccggaagtttgcctccaactctttcgggatcctgagattcaacagtgtatgatgcctgttactagcattcacatggatctagagcctctgctaaccatgttcatgccttcttctttttcctacagctcctgggcaacgtgctggttattgtgaccggtcgctagccaccatggtgagcaagggcgaggagctgttcaccggggtggtgcccatcctggtcgagctggacggcgacgtaaacggccacaagttcagcgtgtccggcgagggcgagggcgatgccacctacggcaagctgaccctgaagttcatctgcaccaccggcaagctgcccgtgccctggcccaccctcgtgaccaccctgacctacggcgtgcagtgcttcagccgctaccccgaccacatgaagcagcacgacttcttcaagtccgccatgcccgaaggctacgtccaggagcgcaccatcttcttcaaggacgacggcaactacaagacccgcgccgaggtgaagttcgagggcgacaccctggtgaaccgcatcgagctgaagggcatcgacttcaaggaggacggcaacatcctggggcacaagctggagtacaactacaacagccacaacgtctatatcatggccgacaagcagaagaacggcatcaaggtgaacttcaagatccgccacaacatcgaggacggcagcgtgcagctcgccgaccactaccagcagaacacccccatcggcgacggccccgtgctgctgcccgacaaccactacctgagcacccagtccgccctgagcaaagaccccaacgagaagcgcgatcacatggtcctgctggagttcgtgaccgccgccgggatcactctcggcatggacgagctgtacaagtaacctgcaggcgccggcgtcctctgagtgctgaaggcttgctgtaggctgtatgctgttgagtctcagagatgcccggaagtttgcctccaactctttcgggatcctgagattcaacagtgtatgatgcctgttactagcattcacatggagagctcgctgatcagcctcgactgtgccttctagttgccagccatctgttgtttgcccctcccccgtgccttccttgaccctggaaggtgccactcccactgtcctttcctaataaaatgaggaaattgcatcgcattgtctgagtaggtgtcattctattctggggggtggggtggggcaggacagcaagggggaggattgggaagacaatagcaggcatgctggggatgcggtgggctctatggaagcttgaattcagctgacgtgcctcggaccgctaggaacccctagtgatggagttggccactccctctctgcgcgctcgctcgctcactgaggccgggcgaccaaaggtcgcccgacgcccgggctttgcccgggcggcctcagtgagcgagcgagcgcgcag

SEQ ID NO: 232 - DNA, 2963 bp, Artificial Sequence
  source: /note="Description of Artificial Sequence: Synthetic polynucleotide"
cctgcaggcagctgcgcgctcgctcgctcactgaggccgcccgggcgtcgggcgacctttggtcgcccggcctcagtgagcgagcgagcgcgcagagagggagtggccaactccatcactaggggttcctgcggccgcacgcgtgacattgattattgactagttattaatagtaatcaattacggggtcattagttcatagcccatatatggagttccgcgttacataacttacggtaaatggcccgcctggctgaccgcccaacgacccccgcccattgacgtcaataatgacgtatgttcccatagtaacgccaatagggactttccattgacgtcaatgggtggactatttacggtaaactgcccacttggcagtacatcaagtgtatcatatgccaagtacgccccctattgacgtcaatgacggtaaatggcccgcctggcattatgcccagtacatgaccttatgggactttcctacttggcagtacatctacgtattagtcatcgctattaccatgggtcgaggtgagccccacgttctgcttcactctccccatctcccccccctccccacccccaattttgtatttatttattttttaattattttgtgcagcgatgggggcggggggggggggggcgcgcgccaggcggggcggggcggggcgaggggcggggcggggcgaggcggagaggtgcggcggcagccaatcagagcggcgcgctccgaaagtttccttttatggcgaggcggcggcggcggcggccctataaaaagcgaagcgcgcggcgggcgggagtcgctgcgttgccttcgccccgtgccccgctccgcgccgcctcgcgccgcccgccccggctctgactgaccgcgttactcccacaggtgagcgggcgggacggcccttctcctccgggctgtaattagcgcttggtttaatgacggctcgtttcttttctgtggctgcgtgaaagccttaaagggctccgggagggccctttgtgcgggggggagcggctcggggggtgcgtgcgtgtgtgtgtgcgtggggagcgccgcgtgcggcccgcgctgcccggcggctgtgagcgctgcgggcgcggcgcggggctttgtgcgctccgcgtgtgcgcgaggggagcgcggccgggggcggtgccccgcggtgcgggggggctgcgaggggaacaaaggctgcgtgcggggtgtgtgcgtgggggggtgagcagggggtgtgggcgcggcggtcgggctgtaacccccccctgcacccccctccccgagttgctgagcacggcccggcttcgggtgcggggctccgtgcggggcgtggcgcggggctcgccgtgccgggcggggggtggcggcaggtgggggtgccgggcggggcggggccgcctcgggccggggagggctcgggggaggggcgcggcggcccccggagcgccggcgtcctctgagtgctgaaggcttgctgtaggctgtatgctgttctcgaagtgcttctgccgggtttttgcctccaactgactcggcgaatacttcgagaacagtgtatgatgcctgttactagcattcacatggatctagagcctctgctaaccatgttcatgccttcttctttttcctacagctcctgggcaacgtgctggttattgtgaccggtcgctagccaccatggtgagcaagggcgaggagctgttcaccggggtggtgcccatcctggtcgagctggacggcgacgtaaacggccacaagttcagcgtgtccggcgagggcgagggcgatgccacctacggcaagctgaccctgaagttcatctgcaccaccggcaagctgcccgtgccctggcccaccctcgtgaccaccctgacctacggcgtgcagtgcttcagccgctaccccgaccacatgaagcagcacgacttcttcaagtccgccatgcccgaaggctacgtccaggagcgcaccatcttcttcaaggacgacggcaactacaagacccgcgccgaggtgaagttcgagggcgacaccctggtgaaccgcatcgagctgaagggcatcgacttcaaggaggacggcaacatcctggggcacaagctggagtacaactacaacagccacaacgtctatatcatggccgacaagcagaagaacggcatcaaggtgaacttcaagatccgccacaacatcgaggacggcagcgtgcagctcgccgaccactaccagcagaacacccccatcggcgacggccccgtgctgctgcccgacaaccactacctgagcacccagtccgccctgagcaaagaccccaacgagaagcgcgatcacatggtcctgctggagttcgtgaccgccgccgggatcactctcggcatggacgagctgtacaagtaacctgcaggcgccggcgtcctctgagtgctgaaggcttgctgtaggctgtatgctgttctcgaagtgcttctgccgggtttttgcctccaactgactcggcgaatacttcgagaacagtgtatgatgcctgttactagcattcacatggagagctcgctgatcagcctcgactgtgccttctagttgccagccatctgttgtttgcccctcccccgtgccttccttgaccctggaaggtgccactcccactgtcctttcctaataaaatgaggaaattgcatcgcattgtctgagtaggtgtcattctattctggggggtggggtggggcaggacagcaagggggaggattgggaagacaatagcaggcatgctggggatgcggtgggctctatggaagcttgaattcagctgacgtgcctcggaccgctaggaacccctagtgatggagttggccactccctctctgcgcgctcgctcgctcactgaggccgggcgaccaaaggtcgcccgacgcccgggctttgcccgggcggcctcagtgagcgagcgagcgcgcag

SEQ ID NO: 233 - DNA, 2963 bp, Artificial Sequence
  source: /note="Description of Artificial Sequence: Synthetic polynucleotide"
cctgcaggcagctgcgcgctcgctcgctcactgaggccgcccgggcgtcgggcgacctttggtcgcccggcctcagtgagcgagcgagcgcgcagagagggagtggccaactccatcactaggggttcctgcggccgcacgcgtgacattgattattgactagttattaatagtaatcaattacggggtcattagttcatagcccatatatggagttccgcgttacataacttacggtaaatggcccgcctggctgaccgcccaacgacccccgcccattgacgtcaataatgacgtatgttcccatagtaacgccaatagggactttccattgacgtcaatgggtggactatttacggtaaactgcccacttggcagtacatcaagtgtatcatatgccaagtacgccccctattgacgtcaatgacggtaaatggcccgcctggcattatgcccagtacatgaccttatgggactttcctacttggcagtacatctacgtattagtcatcgctattaccatgggtcgaggtgagccccacgttctgcttcactctccccatctcccccccctccccacccccaattttgtatttatttattttttaattattttgtgcagcgatgggggcggggggggggggggcgcgcgccaggcggggcggggcggggcgaggggcggggcggggcgaggcggagaggtgcggcggcagccaatcagagcggcgcgctccgaaagtttccttttatggcgaggcggcggcggcggcggccctataaaaagcgaagcgcgcggcgggcgggagtcgctgcgttgccttcgccccgtgccccgctccgcgccgcctcgcgccgcccgccccggctctgactgaccgcgttactcccacaggtgagcgggcgggacggcccttctcctccgggctgtaattagcgcttggtttaatgacggctcgtttcttttctgtggctgcgtgaaagccttaaagggctccgggagggccctttgtgcgggggggagcggctcggggggtgcgtgcgtgtgtgtgtgcgtggggagcgccgcgtgcggcccgcgctgcccggcggctgtgagcgctgcgggcgcggcgcggggctttgtgcgctccgcgtgtgcgcgaggggagcgcggccgggggcggtgccccgcggtgcgggggggctgcgaggggaacaaaggctgcgtgcggggtgtgtgcgtgggggggtgagcagggggtgtgggcgcggcggtcgggctgtaacccccccctgcacccccctccccgagttgctgagcacggcccggcttcgggtgcggggctccgtgcggggcgtggcgcggggctcgccgtgccgggcggggggtggcggcaggtgggggtgccgggcggggcggggccgcctcgggccggggagggctcgggggaggggcgcggcggcccccggagcgccggcgtcctctgagtgctgaaggcttgctgtaggctgtatgctgttctccaccttgaccacgcgtgtttttgcctccaactgacatgtgggtaaggtggagaacagtgtatgatgcctgttactagcattcacatggatctagagcctctgctaaccatgttcatgccttcttctttttcctacagctcctgggcaacgtgctggttattgtgaccggtcgctagccaccatggtgagcaagggcgaggagctgttcaccggggtggtgcccatcctggtcgagctggacggcgacgtaaacggccacaagttcagcgtgtccggcgagggcgagggcgatgccacctacggcaagctgaccctgaagttcatctgcaccaccggcaagctgcccgtgccctggcccaccctcgtgaccaccctgacctacggcgtgcagtgcttcagccgctaccccgaccacatgaagcagcacgacttcttcaagtccgccatgcccgaaggctacgtccaggagcgcaccatcttcttcaaggacgacggcaactacaagacccgcgccgaggtgaagttcgagggcgacaccctggtgaaccgcatcgagctgaagggcatcgacttcaaggaggacggcaacatcctggggcacaagctggagtacaactacaacagccacaacgtctatatcatggccgacaagcagaagaacggcatcaaggtgaacttcaagatccgccacaacatcgaggacggcagcgtgcagctcgccgaccactaccagcagaacacccccatcggcgacggccccgtgctgctgcccgacaaccactacctgagcacccagtccgccctgagcaaagaccccaacgagaagcgcgatcacatggtcctgctggagttcgtgaccgccgccgggatcactctcggcatggacgagctgtacaagtaacctgcaggcgccggcgtcctctgagtgctgaaggcttgctgtaggctgtatgctgttctccaccttgaccacgcgtgtttttgcctccaactgacatgtgggtaaggtggagaacagtgtatgatgcctgttactagcattcacatggagagctcgctgatcagcctcgactgtgccttctagttgccagccatctgttgtttgcccctcccccgtgccttccttgaccctggaaggtgccactcccactgtcctttcctaataaaatgaggaaattgcatcgcattgtctgagtaggtgtcattctattctggggggtggggtggggcaggacagcaagggggaggattgggaagacaatagcaggcatgctggggatgcggtgggctctatggaagcttgaattcagctgacgtgcctcggaccgctaggaacccctagtgatggagttggccactccctctctgcgcgctcgctcgctcactgaggccgggcgaccaaaggtcgcccgacgcccgggctttgcccgggcggcctcagtgagcgagcgagcgcgcag

SEQ ID NO: 234 - DNA, 2963 bp, Artificial Sequence
  source: /note="Description of Artificial Sequence: Synthetic polynucleotide"
cctgcaggcagctgcgcgctcgctcgctcactgaggccgcccgggcgtcgggcgacctttggtcgcccggcctcagtgagcgagcgagcgcgcagagagggagtggccaactccatcactaggggttcctgcggccgcacgcgtgacattgattattgactagttattaatagtaatcaattacggggtcattagttcatagcccatatatggagttccgcgttacataacttacggtaaatggcccgcctggctgaccgcccaacgacccccgcccattgacgtcaataatgacgtatgttcccatagtaacgccaatagggactttccattgacgtcaatgggtggactatttacggtaaactgcccacttggcagtacatcaagtgtatcatatgccaagtacgccccctattgacgtcaatgacggtaaatggcccgcctggcattatgcccagtacatgaccttatgggactttcctacttggcagtacatctacgtattagtcatcgctattaccatgggtcgaggtgagccccacgttctgcttcactctccccatctcccccccctccccacccccaattttgtatttatttattttttaattattttgtgcagcgatgggggcggggggggggggggcgcgcgccaggcggggcggggcggggcgaggggcggggcggggcgaggcggagaggtgcggcggcagccaatcagagcggcgcgctccgaaagtttccttttatggcgaggcggcggcggcggcggccctataaaaagcgaagcgcgcggcgggcgggagtcgctgcgttgccttcgccccgtgccccgctccgcgccgcctcgcgccgcccgccccggctctgactgaccgcgttactcccacaggtgagcgggcgggacggcccttctcctccgggctgtaattagcgcttggtttaatgacggctcgtttcttttctgtggctgcgtgaaagccttaaagggctccgggagggccctttgtgcgggggggagcggctcggggggtgcgtgcgtgtgtgtgtgcgtggggagcgccgcgtgcggcccgcgctgcccggcggctgtgagcgctgcgggcgcggcgcggggctttgtgcgctccgcgtgtgcgcgaggggagcgcggccgggggcggtgccccgcggtgcgggggggctgcgaggggaacaaaggctgcgtgcggggtgtgtgcgtgggggggtgagcagggggtgtgggcgcggcggtcgggctgtaacccccccctgcacccccctccccgagttgctgagcacggcccggcttcgggtgcggggctccgtgcggggcgtggcgcggggctcgccgtgccgggcggggggtggcggcaggtgggggtgccgggcggggcggggccgcctcgggccggggagggctcgggggaggggcgcggcggcccccggagcgccggcgtcctctgagtgctgaaggcttgctgtaggctgtatgctgatactgtcatagtagtaccaggtttttgcctccaactgacctggtctatatgacagtatcagtgtatgatgcctgttactagcattcacatggatctagagcctctgctaaccatgttcatgccttcttctttttcctacagctcctgggcaacgtgctggttattgtgaccggtcgctagccaccatggtgagcaagggcgaggagctgttcaccggggtggtgcccatcctggtcgagctggacggcgacgtaaacggccacaagttcagcgtgtccggcgagggcgagggcgatgccacctacggcaagctgaccctgaagttcatctgcaccaccggcaagctgcccgtgccctggcccaccctcgtgaccaccctgacctacggcgtgcagtgcttcagccgctaccccgaccacatgaagcagcacgacttcttcaagtccgccatgcccgaaggctacgtccaggagcgcaccatcttcttcaaggacgacggcaactacaagacccgcgccgaggtgaagttcgagggcgacaccctggtgaaccgcatcgagctgaagggcatcgacttcaaggaggacggcaacatcctggggcacaagctggagtacaactacaacagccacaacgtctatatcatggccgacaagcagaagaacggcatcaaggtgaacttcaagatccgccacaacatcgaggacggcagcgtgcagctcgccgaccactaccagcagaacacccccatcggcgacggccccgtgctgctgcccgacaaccactacctgagcacccagtccgccctgagcaaagaccccaacgagaagcgcgatcacatggtcctgctggagttcgtgaccgccgccgggatcactctcggcatggacgagctgtacaagtaacctgcaggcgccggcgtcctctgagtgctgaaggcttgctgtaggctgtatgctgatactgtcatagtagtaccaggtttttgcctccaactgacctggtctatatgacagtatcagtgtatgatgcctgttactagcattcacatggagagctcgctgatcagcctcgactgtgccttctagttgccagccatctgttgtttgcccctcccccgtgccttccttgaccctggaaggtgccactcccactgtcctttcctaataaaatgaggaaattgcatcgcattgtctgagtaggtgtcattctattctggggggtggggtggggcaggacagcaagggggaggattgggaagacaatagcaggcatgctggggatgcggtgggctctatggaagcttgaattcagctgacgtgcctcggaccgctaggaacccctagtgatggagttggccactccctctctgcgcgctcgctcgctcactgaggccgggcgaccaaaggtcgcccgacgcccgggctttgcccgggcggcctcagtgagcgagcgagcgcgcag

SEQ ID NO: 235 - DNA, 2963 bp, Artificial Sequence
  source: /note="Description of Artificial Sequence: Synthetic polynucleotide"
cctgcaggcagctgcgcgctcgctcgctcactgaggccgcccgggcgtcgggcgacctttggtcgcccggcctcagtgagcgagcgagcgcgcagagagggagtggccaactccatcactaggggttcctgcggccgcacgcgtgacattgattattgactagttattaatagtaatcaattacggggtcattagttcatagcccatatatggagttccgcgttacataacttacggtaaatggcccgcctggctgaccgcccaacgacccccgcccattgacgtcaataatgacgtatgttcccatagtaacgccaatagggactttccattgacgtcaatgggtggactatttacggtaaactgcccacttggcagtacatcaagtgtatcatatgccaagtacgccccctattgacgtcaatgacggtaaatggcccgcctggcattatgcccagtacatgaccttatgggactttcctacttggcagtacatctacgtattagtcatcgctattaccatgggtcgaggtgagccccacgttctgcttcactctccccatctcccccccctccccacccccaattttgtatttatttattttttaattattttgtgcagcgatgggggcggggggggggggggcgcgcgccaggcggggcggggcggggcgaggggcggggcggggcgaggcggagaggtgcggcggcagccaatcagagcggcgcgctccgaaagtttccttttatggcgaggcggcggcggcggcggccctataaaaagcgaagcgcgcggcgggcgggagtcgctgcgttgccttcgccccgtgccccgctccgcgccgcctcgcgccgcccgccccggctctgactgaccgcgttactcccacaggtgagcgggcgggacggcccttctcctccgggctgtaattagcgcttggtttaatgacggctcgtttcttttctgtggctgcgtgaaagccttaaagggctccgggagggccctttgtgcgggggggagcggctcggggggtgcgtgcgtgtgtgtgtgcgtggggagcgccgcgtgcggcccgcgctgcccggcggctgtgagcgctgcgggcgcggcgcggggctttgtgcgctccgcgtgtgcgcgaggggagcgcggccgggggcggtgccccgcggtgcgggggggctgcgaggggaacaaaggctgcgtgcggggtgtgtgcgtgggggggtgagcagggggtgtgggcgcggcggtcgggctgtaacccccccctgcacccccctccccgagttgctgagcacggcccggcttcgggtgcggggctccgtgcggggcgtggcgcggggctcgccgtgccgggcggggggtggcggcaggtgggggtgccgggcggggcggggccgcctcgggccggggagggctcgggggaggggcgcggcggcccccggagcgccggcgtcctctgagtgctgaaggcttgctgtaggctgtatgctgtagtcggaggtgatgtcgggggtttttgcctccaactgactcctgcataccttcgattacagtgtatgatgcctgttactagcattcacatggatctagagcctctgctaaccatgttcatgccttcttctttttcctacagctcctgggcaacgtgctggttattgtgaccggtcgctagccaccatggtgagcaagggcgaggagctgttcaccggggtggtgcccatcctggtcgagctggacggcgacgtaaacggccacaagttcagcgtgtccggcgagggcgagggcgatgccacctacggcaagctgaccctgaagttcatctgcaccaccggcaagctgcccgtgccctggcccaccctcgtgaccaccctgacctacggcgtgcagtgcttcagccgctaccccgaccacatgaagcagcacgacttcttcaagtccgccatgcccgaaggctacgtccaggagcgcaccatcttcttcaaggacgacggcaactacaagacccgcgccgaggtgaagttcgagggcgacaccctggtgaaccgcatcgagctgaagggcatcgacttcaaggaggacggcaacatcctggggcacaagctggagtacaactacaacagccacaacgtctatatcatggccgacaagcagaagaacggcatcaaggtgaacttcaagatccgccacaacatcgaggacggcagcgtgcagctcgccgaccactaccagcagaacacccccatcggcgacggccccgtgctgctgcccgacaaccactacctgagcacccagtccgccctgagcaaagaccccaacgagaagcgcgatcacatggtcctgctggagttcgtgaccgccgccgggatcactctcggcatggacgagctgtacaagtaacctgcaggcgccggcgtcctctgagtgctgaaggcttgctgtaggctgtatgctgtagtcggaggtgatgtcgggggtttttgcctccaactgactcctgcataccttcgattacagtgtatgatgcctgttactagcattcacatggagagctcgctgatcagcctcgactgtgccttctagttgccagccatctgttgtttgcccctcccccgtgccttccttgaccctggaaggtgccactcccactgtcctttcctaataaaatgaggaaattgcatcgcattgtctgagtaggtgtcattctattctggggggtggggtggggcaggacagcaagggggaggattgggaagacaatagcaggcatgctggggatgcggtgggctctatggaagcttgaattcagctgacgtgcctcggaccgctaggaacccctagtgatggagttggccactccctctctgcgcgctcgctcgctcactgaggccgggcgaccaaaggtcgcccgacgcccgggctttgcccgggcggcctcagtgagcgagcgagcgcgcag

SEQ ID NO: 236 - DNA, 2951 bp, Artificial Sequence
  source: /note="Description of Artificial Sequence: Synthetic polynucleotide"
cctgcaggcagctgcgcgctcgctcgctcactgaggccgcccgggcgtcgggcgacctttggtcgcccggcctcagtgagcgagcgagcgcgcagagagggagtggccaactccatcactaggggttcctgcggccgcacgcgtgacattgattattgactagttattaatagtaatcaattacggggtcattagttcatagcccatatatggagttccgcgttacataacttacggtaaatggcccgcctggctgaccgcccaacgacccccgcccattgacgtcaataatgacgtatgttcccatagtaacgccaatagggactttccattgacgtcaatgggtggactatttacggtaaactgcccacttggcagtacatcaagtgtatcatatgccaagtacgccccctattgacgtcaatgacggtaaatggcccgcctggcattatgcccagtacatgaccttatgggactttcctacttggcagtacatctacgtattagtcatcgctattaccatgggtcgaggtgagccccacgttctgcttcactctccccatctcccccccctccccacccccaattttgtatttatttattttttaattattttgtgcagcgatgggggcggggggggggggggcgcgcgccaggcggggcggggcggggcgaggggcggggcggggcgaggcggagaggtgcggcggcagccaatcagagcggcgcgctccgaaagtttccttttatggcgaggcggcggcggcggcggccctataaaaagcgaagcgcgcggcgggcgggagtcgctgcgttgccttcgccccgtgccccgctccgcgccgcctcgcgccgcccgccccggctctgactgaccgcgttactcccacaggtgagcgggcgggacggcccttctcctccgggctgtaattagcgcttggtttaatgacggctcgtttcttttctgtggctgcgtgaaagccttaaagggctccgggagggccctttgtgcgggggggagcggctcggggggtgcgtgcgtgtgtgtgtgcgtggggagcgccgcgtgcggcccgcgctgcccggcggctgtgagcgctgcgggcgcggcgcggggctttgtgcgctccgcgtgtgcgcgaggggagcgcggccgggggcggtgccccgcggtgcgggggggctgcgaggggaacaaaggctgcgtgcggggtgtgtgcgtgggggggtgagcagggggtgtgggcgcggcggtcgggctgtaacccccccctgcacccccctccccgagttgctgagcacggcccggcttcgggtgcggggctccgtgcggggcgtggcgcggggctcgccgtgccgggcggggggtggcggcaggtgggggtgccgggcggggcggggccgcctcgggccggggagggctcgggggaggggcgcggcggcccccggagcgccggcgcatagctcttatgatagcaatgtcagcagtgcctttgagaatcctgatggagcgggttaagattctaaaattatcacgctccatgagtgattctcagaagtaaggttgaccatactctacagttgtgtctagagcctctgctaaccatgttcatgccttcttctttttcctacagctcctgggcaacgtgctggttattgtgaccggtcgctagccaccatggtgagcaagggcgaggagctgttcaccggggtggtgcccatcctggtcgagctggacggcgacgtaaacggccacaagttcagcgtgtccggcgagggcgagggcgatgccacctacggcaagctgaccctgaagttcatctgcaccaccggcaagctgcccgtgccctggcccaccctcgtgaccaccctgacctacggcgtgcagtgcttcagccgctaccccgaccacatgaagcagcacgacttcttcaagtccgccatgcccgaaggctacgtccaggagcgcaccatcttcttcaaggacgacggcaactacaagacccgcgccgaggtgaagttcgagggcgacaccctggtgaaccgcatcgagctgaagggcatcgacttcaaggaggacggcaacatcctggggcacaagctggagtacaactacaacagccacaacgtctatatcatggccgacaagcagaagaacggcatcaaggtgaacttcaagatccgccacaacatcgaggacggcagcgtgcagctcgccgaccactaccagcagaacacccccatcggcgacggccccgtgctgctgcccgacaaccactacctgagcacccagtccgccctgagcaaagaccccaacgagaagcgcgatcacatggtcctgctggagttcgtgaccgccgccgggatcactctcggcatggacgagctgtacaagtaacctgcaggcgccggcgcatagctcttatgatagcaatgtcagcagtgcctttgagaatcctgatggagcgggttaagattctaaaattatcacgctccatgagtgattctcagaagtaaggttgaccatactctacagttgtggagctcgctgatcagcctcgactgtgccttctagttgccagccatctgttgtttgcccctcccccgtgccttccttgaccctggaaggtgccactcccactgtcctttcctaataaaatgaggaaattgcatcgcattgtctgagtaggtgtcattctattctggggggtggggtggggcaggacagcaagggggaggattgggaagacaatagcaggcatgctggggatgcggtgggctctatggaagcttgaattcagctgacgtgcctcggaccgctaggaacccctagtgatggagttggccactccctctctgcgcgctcgctcgctcactgaggccgggcgaccaaaggtcgcccgacgcccgggctttgcccgggcggcctcagtgagcgagcgagcgcgcag

SEQ ID NO: 237 - DNA, 2989 bp, Artificial Sequence
  source: /note="Description of Artificial Sequence: Synthetic polynucleotide"
cctgcaggcagctgcgcgctcgctcgctcactgaggccgcccgggcgtcgggcgacctttggtcgcccggcctcagtgagcgagcgagcgcgcagagagggagtggccaactccatcactaggggttcctgcggccgcacgcgtgacattgattattgactagttattaatagtaatcaattacggggtcattagttcatagcccatatatggagttccgcgttacataacttacggtaaatggcccgcctggctgaccgcccaacgacccccgcccattgacgtcaataatgacgtatgttcccatagtaacgccaatagggactttccattgacgtcaatgggtggactatttacggtaaactgcccacttggcagtacatcaagtgtatcatatgccaagtacgccccctattgacgtcaatgacggtaaatggcccgcctggcattatgcccagtacatgaccttatgggactttcctacttggcagtacatctacgtattagtcatcgctattaccatgggtcgaggtgagccccacgttctgcttcactctccccatctcccccccctccccacccccaattttgtatttatttattttttaattattttgtgcagcgatgggggcggggggggggggggcgcgcgccaggcggggcggggcggggcgaggggcggggcggggcgaggcggagaggtgcggcggcagccaatcagagcggcgcgctccgaaagtttccttttatggcgaggcggcggcggcggcggccctataaaaagcgaagcgcgcggcgggcgggagtcgctgcgttgccttcgccccgtgccccgctccgcgccgcctcgcgccgcccgccccggctctgactgaccgcgttactcccacaggtgagcgggcgggacggcccttctcctccgggctgtaattagcgcttggtttaatgacggctcgtttcttttctgtggctgcgtgaaagccttaaagggctccgggagggccctttgtgcgggggggagcggctcggggggtgcgtgcgtgtgtgtgtgcgtggggagcgccgcgtgcggcccgcgctgcccggcggctgtgagcgctgcgggcgcggcgcggggctttgtgcgctccgcgtgtgcgcgaggggagcgcggccgggggcggtgccccgcggtgcgggggggctgcgaggggaacaaaggctgcgtgcggggtgtgtgcgtgggggggtgagcagggggtgtgggcgcggcggtcgggctgtaacccccccctgcacccccctccccgagttgctgagcacggcccggcttcgggtgcggggctccgtgcggggcgtggcgcggggctcgccgtgccgggcggggggtggcggcaggtgggggtgccgggcggggcggggccgcctcgggccggggagggctcgggggaggggcgcggcggcccccggagcgccggcggagcaggaggaccaaggccctggcgaaggccgtggcctcgttgagaatcctgatggagcggtgtgcaggtcccaatggccgctccataaggattctccacggggacgcgggcctggacgccggcatccgggctcaggacccccctctctagagcctctgctaaccatgttcatgccttcttctttttcctacagctcctgggcaacgtgctggttattgtgaccggtcgctagccaccatggtgagcaagggcgaggagctgttcaccggggtggtgcccatcctggtcgagctggacggcgacgtaaacggccacaagttcagcgtgtccggcgagggcgagggcgatgccacctacggcaagctgaccctgaagttcatctgcaccaccggcaagctgcccgtgccctggcccaccctcgtgaccaccctgacctacggcgtgcagtgcttcagccgctaccccgaccacatgaagcagcacgacttcttcaagtccgccatgcccgaaggctacgtccaggagcgcaccatcttcttcaaggacgacggcaactacaagacccgcgccgaggtgaagttcgagggcgacaccctggtgaaccgcatcgagctgaagggcatcgacttcaaggaggacggcaacatcctggggcacaagctggagtacaactacaacagccacaacgtctatatcatggccgacaagcagaagaacggcatcaaggtgaacttcaagatccgccacaacatcgaggacggcagcgtgcagctcgccgaccactaccagcagaacacccccatcggcgacggccccgtgctgctgcccgacaaccactacctgagcacccagtccgccctgagcaaagaccccaacgagaagcgcgatcacatggtcctgctggagttcgtgaccgccgccgggatcactctcggcatggacgagctgtacaagtaacctgcaggcgccggcggagcaggaggaccaaggccctggcgaaggccgtggcctcgttgagaatcctgatggagcggtgtgcaggtcccaatggccgctccataaggattctccacggggacgcgggcctggacgccggcatccgggctcaggacccccctcgagctcgctgatcagcctcgactgtgccttctagttgccagccatctgttgtttgcccctcccccgtgccttccttgaccctggaaggtgccactcccactgtcctttcctaataaaatgaggaaattgcatcgcattgtctgagtaggtgtcattctattctggggggtggggtggggcaggacagcaagggggaggattgggaagacaatagcaggcatgctggggatgcggtgggctctatggaagcttgaattcagctgacgtgcctcggaccgctaggaacccctagtgatggagttggccactccctctctgcgcgctcgctcgctcactgaggccgggcgaccaaaggtcgcccgacgcccgggctttgcccgggcggcctcagtgagcgagcgagcgcgcag

SEQ ID NO: 238 - DNA, 2993 bp, Artificial Sequence
  source: /note="Description of Artificial Sequence: Synthetic polynucleotide"
cctgcaggcagctgcgcgctcgctcgctcactgaggccgcccgggcgtcgggcgacctttggtcgcccggcctcagtgagcgagcgagcgcgcagagagggagtggccaactccatcactaggggttcctgcggccgcacgcgtgacattgattattgactagttattaatagtaatcaattacggggtcattagttcatagcccatatatggagttccgcgttacataacttacggtaaatggcccgcctggctgaccgcccaacgacccccgcccattgacgtcaataatgacgtatgttcccatagtaacgccaatagggactttccattgacgtcaatgggtggactatttacggtaaactgcccacttggcagtacatcaagtgtatcatatgccaagtacgccccctattgacgtcaatgacggtaaatggcccgcctggcattatgcccagtacatgaccttatgggactttcctacttggcagtacatctacgtattagtcatcgctattaccatgggtcgaggtgagccccacgttctgcttcactctccccatctcccccccctccccacccccaattttgtatttatttattttttaattattttgtgcagcgatgggggcggggggggggggggcgcgcgccaggcggggcggggcggggcgaggggcggggcggggcgaggcggagaggtgcggcggcagccaatcagagcggcgcgctccgaaagtttccttttatggcgaggcggcggcggcggcggccctataaaaagcgaagcgcgcggcgggcgggagtcgctgcgttgccttcgccccgtgccccgctccgcgccgcctcgcgccgcccgccccggctctgactgaccgcgttactcccacaggtgagcgggcgggacggcccttctcctccgggctgtaattagcgcttggtttaatgacggctcgtttcttttctgtggctgcgtgaaagccttaaagggctccgggagggccctttgtgcgggggggagcggctcggggggtgcgtgcgtgtgtgtgtgcgtggggagcgccgcgtgcggcccgcgctgcccggcggctgtgagcgctgcgggcgcggcgcggggctttgtgcgctccgcgtgtgcgcgaggggagcgcggccgggggcggtgccccgcggtgcgggggggctgcgaggggaacaaaggctgcgtgcggggtgtgtgcgtgggggggtgagcagggggtgtgggcgcggcggtcgggctgtaacccccccctgcacccccctccccgagttgctgagcacggcccggcttcgggtgcggggctccgtgcggggcgtggcgcggggctcgccgtgccgggcggggggtggcggcaggtgggggtgccgggcggggcggggccgcctcgggccggggagggctcgggggaggggcgcggcggcccccggagcgccggcggtgtccccagagagcccgcaccagtgccatctgcttggccgatttgagaatcctgatggagcggcttgtgtctctccgctctgagccgggccatcagattctcatatgggaaaagcaggacccgcagctgcgtccgcctcccctgcattctagagcctctgctaaccatgttcatgccttcttctttttcctacagctcctgggcaacgtgctggttattgtgaccggtcgctagccaccatggtgagcaagggcgaggagctgttcaccggggtggtgcccatcctggtcgagctggacggcgacgtaaacggccacaagttcagcgtgtccggcgagggcgagggcgatgccacctacggcaagctgaccctgaagttcatctgcaccaccggcaagctgcccgtgccctggcccaccctcgtgaccaccctgacctacggcgtgcagtgcttcagccgctaccccgaccacatgaagcagcacgacttcttcaagtccgccatgcccgaaggctacgtccaggagcgcaccatcttcttcaaggacgacggcaactacaagacccgcgccgaggtgaagttcgagggcgacaccctggtgaaccgcatcgagctgaagggcatcgacttcaaggaggacggcaacatcctggggcacaagctggagtacaactacaacagccacaacgtctatatcatggccgacaagcagaagaacggcatcaaggtgaacttcaagatccgccacaacatcgaggacggcagcgtgcagctcgccgaccactaccagcagaacacccccatcggcgacggccccgtgctgctgcccgacaaccactacctgagcacccagtccgccctgagcaaagaccccaacgagaagcgcgatcacatggtcctgctggagttcgtgaccgccgccgggatcactctcggcatggacgagctgtacaagtaacctgcaggcgccggcggtgtccccagagagcccgcaccagtgccatctgcttggccgatttgagaatcctgatggagcggcttgtgtctctccgctctgagccgggccatcagattctcatatgggaaaagcaggacccgcagctgcgtccgcctcccctgcatgagctcgctgatcagcctcgactgtgccttctagttgccagccatctgttgtttgcccctcccccgtgccttccttgaccctggaaggtgccactcccactgtcctttcctaataaaatgaggaaattgcatcgcattgtctgagtaggtgtcattctattctggggggtggggtggggcaggacagcaagggggaggattgggaagacaatagcaggcatgctggggatgcggtgggctctatggaagcttgaattcagctgacgtgcctcggaccgctaggaacccctagtgatggagttggccactccctctctgcgcgctcgctcgctcactgaggccgggcgaccaaaggtcgcccgacgcccgggctttgcccgggcggcctcagtgagcgagcgagcgcgcag

SEQ ID NO: 239 - DNA, 2991 bp, Artificial Sequence
  source: /note="Description of Artificial Sequence: Synthetic polynucleotide"
cctgcaggcagctgcgcgctcgctcgctcactgaggccgcccgggcgtcgggcgacctttggtcgcccggcctcagtgagcgagcgagcgcgcagagagggagtggccaactccatcactaggggttcctgcggccgcacgcgtgacattgattattgactagttattaatagtaatcaattacggggtcattagttcatagcccatatatggagttccgcgttacataacttacggtaaatggcccgcctggctgaccgcccaacgacccccgcccattgacgtcaataatgacgtatgttcccatagtaacgccaatagggactttccattgacgtcaatgggtggactatttacggtaaactgcccacttggcagtacatcaagtgtatcatatgccaagtacgccccctattgacgtcaatgacggtaaatggcccgcctggcattatgcccagtacatgaccttatgggactttcctacttggcagtacatctacgtattagtcatcgctattaccatgggtcgaggtgagccccacgttctgcttcactctccccatctcccccccctccccacccccaattttgtatttatttattttttaattattttgtgcagcgatgggggcggggggggggggggcgcgcgccaggcggggcggggcggggcgaggggcggggcggggcgaggcggagaggtgcggcggcagccaatcagagcggcgcgctccgaaagtttccttttatggcgaggcggcggcggcggcggccctataaaaagcgaagcgcgcggcgggcgggagtcgctgcgttgccttcgccccgtgccccgctccgcgccgcctcgcgccgcccgccccggctctgactgaccgcgttactcccacaggtgagcgggcgggacggcccttctcctccgggctgtaattagcgcttggtttaatgacggctcgtttcttttctgtggctgcgtgaaagccttaaagggctccgggagggccctttgtgcgggggggagcggctcggggggtgcgtgcgtgtgtgtgtgcgtggggagcgccgcgtgcggcccgcgctgcccggcggctgtgagcgctgcgggcgcggcgcggggctttgtgcgctccgcgtgtgcgcgaggggagcgcggccgggggcggtgccccgcggtgcgggggggctgcgaggggaacaaaggctgcgtgcggggtgtgtgcgtgggggggtgagcagggggtgtgggcgcggcggtcgggctgtaacccccccctgcacccccctccccgagttgctgagcacggcccggcttcgggtgcggggctccgtgcggggcgtggcgcggggctcgccgtgccgggcggggggtggcggcaggtgggggtgccgggcggggcggggccgcctcgggccggggagggctcgggggaggggcgcggcggcccccggagcgccggcgtgaagttaacaccttcgtggctacagagtttccttagcagagctgttgagaatcctgatggagcgggtgtctaaactatcccgctccatccggattctacatagctactgctaggcaatccttccctcgataaatgtcttggcatcgtctagagcctctgctaaccatgttcatgccttcttctttttcctacagctcctgggcaacgtgctggttattgtgaccggtcgctagccaccatggtgagcaagggcgaggagctgttcaccggggtggtgcccatcctggtcgagctggacggcgacgtaaacggccacaagttcagcgtgtccggcgagggcgagggcgatgccacctacggcaagctgaccctgaagttcatctgcaccaccggcaagctgcccgtgccctggcccaccctcgtgaccaccctgacctacggcgtgcagtgcttcagccgctaccccgaccacatgaagcagcacgacttcttcaagtccgccatgcccgaaggctacgtccaggagcgcaccatcttcttcaaggacgacggcaactacaagacccgcgccgaggtgaagttcgagggcgacaccctggtgaaccgcatcgagctgaagggcatcgacttcaaggaggacggcaacatcctggggcacaagctggagtacaactacaacagccacaacgtctatatcatggccgacaagcagaagaacggcatcaaggtgaacttcaagatccgccacaacatcgaggacggcagcgtgcagctcgccgaccactaccagcagaacacccccatcggcgacggccccgtgctgctgcccgacaaccactacctgagcacccagtccgccctgagcaaagaccccaacgagaagcgcgatcacatggtcctgctggagttcgtgaccgccgccgggatcactctcggcatggacgagctgtacaagtaacctgcaggcgccggcgtgaagttaacaccttcgtggctacagagtttccttagcagagctgttgagaatcctgatggagcgggtgtctaaactatcccgctccatccggattctacatagctactgctaggcaatccttccctcgataaatgtcttggcatcggagctcgctgatcagcctcgactgtgccttctagttgccagccatctgttgtttgcccctcccccgtgccttccttgaccctggaaggtgccactcccactgtcctttcctaataaaatgaggaaattgcatcgcattgtctgagtaggtgtcattctattctggggggtggggtggggcaggacagcaagggggaggattgggaagacaatagcaggcatgctggggatgcggtgggctctatggaagcttgaattcagctgacgtgcctcggaccgctaggaacccctagtgatggagttggccactccctctctgcgcgctcgctcgctcactgaggccgggcgaccaaaggtcgcccgacgcccgggctttgcccgggcggcctcagtgagcgagcgagcgcgcag

SEQ ID NO: 240 - DNA, 2939 bp, Artificial Sequence
  source: /note="Description of Artificial Sequence: Synthetic polynucleotide"
cctgcaggcagctgcgcgctcgctcgctcactgaggccgcccgggcgtcgggcgacctttggtcgcccggcctcagtgagcgagcgagcgcgcagagagggagtggccaactccatcactaggggttcctgcggccgcacgcgtgacattgattattgactagttattaatagtaatcaattacggggtcattagttcatagcccatatatggagttccgcgttacataacttacggtaaatggcccgcctggctgaccgcccaacgacccccgcccattgacgtcaataatgacgtatgttcccatagtaacgccaatagggactttccattgacgtcaatgggtggactatttacggtaaactgcccacttggcagtacatcaagtgtatcatatgccaagtacgccccctattgacgtcaatgacggtaaatggcccgcctggcattatgcccagtacatgaccttatgggactttcctacttggcagtacatctacgtattagtcatcgctattaccatgggtcgaggtgagccccacgttctgcttcactctccccatctcccccccctccccacccccaattttgtatttatttattttttaattattttgtgcagcgatgggggcggggggggggggggcgcgcgccaggcggggcggggcggggcgaggggcggggcggggcgaggcggagaggtgcggcggcagccaatcagagcggcgcgctccgaaagtttccttttatggcgaggcggcggcggcggcggccctataaaaagcgaagcgcgcggcgggcgggagtcgctgcgttgccttcgccccgtgccccgctccgcgccgcctcgcgccgcccgccccggctctgactgaccgcgttactcccacaggtgagcgggcgggacggcccttctcctccgggctgtaattagcgcttggtttaatgacggctcgtttcttttctgtggctgcgtgaaagccttaaagggctccgggagggccctttgtgcgggggggagcggctcggggggtgcgtgcgtgtgtgtgtgcgtggggagcgccgcgtgcggcccgcgctgcccggcggctgtgagcgctgcgggcgcggcgcggggctttgtgcgctccgcgtgtgcgcgaggggagcgcggccgggggcggtgccccgcggtgcgggggggctgcgaggggaacaaaggctgcgtgcggggtgtgtgcgtgggggggtgagcagggggtgtgggcgcggcggtcgggctgtaacccccccctgcacccccctccccgagttgctgagcacggcccggcttcgggtgcggggctccgtgcggggcgtggcgcggggctcgccgtgccgggcggggggtggcggcaggtgggggtgccgggcggggcggggccgcctcgggccggggagggctcgggggaggggcgcggcggcccccggagcgccggcggccgctggacccctccactctgctgtggccttgagaatcctgatggagcgggattgctgtcccaaactcccgctccatcggattctcaaggctacagtgaggggcgagctccttctcctgctctagagcctctgctaaccatgttcatgccttcttctttttcctacagctcctgggcaacgtgctggttattgtgaccggtcgctagccaccatggtgagcaagggcgaggagctgttcaccggggtggtgcccatcctggtcgagctggacggcgacgtaaacggccacaagttcagcgtgtccggcgagggcgagggcgatgccacctacggcaagctgaccctgaagttcatctgcaccaccggcaagctgcccgtgccctggcccaccctcgtgaccaccctgacctacggcgtgcagtgcttcagccgctaccccgaccacatgaagcagcacgacttcttcaagtccgccatgcccgaaggctacgtccaggagcgcaccatcttcttcaaggacgacggcaactacaagacccgcgccgaggtgaagttcgagggcgacaccctggtgaaccgcatcgagctgaagggcatcgacttcaaggaggacggcaacatcctggggcacaagctggagtacaactacaacagccacaacgtctatatcatggccgacaagcagaagaacggcatcaaggtgaacttcaagatccgccacaacatcgaggacggcagcgtgcagctcgccgaccactaccagcagaacacccccatcggcgacggccccgtgctgctgcccgacaaccactacctgagcacccagtccgccctgagcaaagaccccaacgagaagcgcgatcacatggtcctgctggagttcgtgaccgccgccgggatcactctcggcatggacgagctgtacaagtaacctgcaggcgccggcggccgctggacccctccactctgctgtggccttgagaatcctgatggagcgggattgctgtcccaaactcccgctccatcggattctcaaggctacagtgaggggcgagctccttctcctgcgagctcgctgatcagcctcgactgtgccttctagttgccagccatctgttgtttgcccctcccccgtgccttccttgaccctggaaggtgccactcccactgtcctttcctaataaaatgaggaaattgcatcgcattgtctgagtaggtgtcattctattctggggggtggggtggggcaggacagcaagggggaggattgggaagacaatagcaggcatgctggggatgcggtgggctctatggaagcttgaattcagctgacgtgcctcggaccgctaggaacccctagtgatggagttggccactccctctctgcgcgctcgctcgctcactgaggccgggcgaccaaaggtcgcccgacgcccgggctttgcccgggcggcctcagtgagcgagcgagcgcgcag

SEQ ID NO: 241 - DNA, 2995 bp, Artificial Sequence
  source: /note="Description of Artificial Sequence: Synthetic polynucleotide"
cctgcaggcagctgcgcgctcgctcgctcactgaggccgcccgggcgtcgggcgacctttggtcgcccggcctcagtgagcgagcgagcgcgcagagagggagtggccaactccatcactaggggttcctgcggccgcacgcgtgacattgattattgactagttattaatagtaatcaattacggggtcattagttcatagcccatatatggagttccgcgttacataacttacggtaaatggcccgcctggctgaccgcccaacgacccccgcccattgacgtcaataatgacgtatgttcccatagtaacgccaatagggactttccattgacgtcaatgggtggactatttacggtaaactgcccacttggcagtacatcaagtgtatcatatgccaagtacgccccctattgacgtcaatgacggtaaatggcccgcctggcattatgcccagtacatgaccttatgggactttcctacttggcagtacatctacgtattagtcatcgctattaccatgggtcgaggtgagccccacgttctgcttcactctccccatctcccccccctccccacccccaattttgtatttatttattttttaattattttgtgcagcgatgggggcggggggggggggggcgcgcgccaggcggggcggggcggggcgaggggcggggcggggcgaggcggagaggtgcggcggcagccaatcagagcggcgcgctccgaaagtttccttttatggcgaggcggcggcggcggcggccctataaaaagcgaagcgcgcggcgggcgggagtcgctgcgttgccttcgccccgtgccccgctccgcgccgcctcgcgccgcccgccccggctctgactgaccgcgttactcccacaggtgagcgggcgggacggcccttctcctccgggctgtaattagcgcttggtttaatgacggctcgtttcttttctgtggctgcgtgaaagccttaaagggctccgggagggccctttgtgcgggggggagcggctcggggggtgcgtgcgtgtgtgtgtgcgtggggagcgccgcgtgcggcccgcgctgcccggcggctgtgagcgctgcgggcgcggcgcggggctttgtgcgctccgcgtgtgcgcgaggggagcgcggccgggggcggtgccccgcggtgcgggggggctgcgaggggaacaaaggctgcgtgcggggtgtgtgcgtgggggggtgagcagggggtgtgggcgcggcggtcgggctgtaacccccccctgcacccccctccccgagttgctgagcacggcccggcttcgggtgcggggctccgtgcggggcgtggcgcggggctcgccgtgccgggcggggggtggcggcaggtgggggtgccgggcggggcggggccgcctcgggccggggagggctcgggggaggggcgcggcggcccccggagcgccggcgctccccagctcctggggggagctgcttgcctccccccgttttgagaatcctgatggagcggactggtgaggtaacaggatccgccgtccatctttattctcactatggggcgaggactcagccggcaccctgtgcacagccagcgagggtctagagcctctgctaaccatgttcatgccttcttctttttcctacagctcctgggcaacgtgctggttattgtgaccggtcgctagccaccatggtgagcaagggcgaggagctgttcaccggggtggtgcccatcctggtcgagctggacggcgacgtaaacggccacaagttcagcgtgtccggcgagggcgagggcgatgccacctacggcaagctgaccctgaagttcatctgcaccaccggcaagctgcccgtgccctggcccaccctcgtgaccaccctgacctacggcgtgcagtgcttcagccgctaccccgaccacatgaagcagcacgacttcttcaagtccgccatgcccgaaggctacgtccaggagcgcaccatcttcttcaaggacgacggcaactacaagacccgcgccgaggtgaagttcgagggcgacaccctggtgaaccgcatcgagctgaagggcatcgacttcaaggaggacggcaacatcctggggcacaagctggagtacaactacaacagccacaacgtctatatcatggccgacaagcagaagaacggcatcaaggtgaacttcaagatccgccacaacatcgaggacggcagcgtgcagctcgccgaccactaccagcagaacacccccatcggcgacggccccgtgctgctgcccgacaaccactacctgagcacccagtccgccctgagcaaagaccccaacgagaagcgcgatcacatggtcctgctggagttcgtgaccgccgccgggatcactctcggcatggacgagctgtacaagtaacctgcaggcgccggcgctccccagctcctggggggagctgcttgcctccccccgttttgagaatcctgatggagcggactggtgaggtaacaggatccgccgtccatctttattctcactatggggcgaggactcagccggcaccctgtgcacagccagcgaggggagctcgctgatcagcctcgactgtgccttctagttgccagccatctgttgtttgcccctcccccgtgccttccttgaccctggaaggtgccactcccactgtcctttcctaataaaatgaggaaattgcatcgcattgtctgagtaggtgtcattctattctggggggtggggtggggcaggacagcaagggggaggattgggaagacaatagcaggcatgctggggatgcggtgggctctatggaagcttgaattcagctgacgtgcctcggaccgctaggaacccctagtgatggagttggccactccctctctgcgcgctcgctcgctcactgaggccgggcgaccaaaggtcgcccgacgcccgggctttgcccgggcggcctcagtgagcgagcgagcgcgcag

SEQ ID NO: 242 - DNA, 2977 bp, Artificial Sequence
  source: /note="Description of Artificial Sequence: Synthetic polynucleotide"
cctgcaggcagctgcgcgctcgctcgctcactgaggccgcccgggcgtcgggcgacctttggtcgcccggcctcagtgagcgagcgagcgcgcagagagggagtggccaactccatcactaggggttcctgcggccgcacgcgtgacattgattattgactagttattaatagtaatcaattacggggtcattagttcatagcccatatatggagttccgcgttacataacttacggtaaatggcccgcctggctgaccgcccaacgacccccgcccattgacgtcaataatgacgtatgttcccatagtaacgccaatagggactttccattgacgtcaatgggtggactatttacggtaaactgcccacttggcagtacatcaagtgtatcatatgccaagtacgccccctattgacgtcaatgacggtaaatggcccgcctggcattatgcccagtacatgaccttatgggactttcctacttggcagtacatctacgtattagtcatcgctattaccatgggtcgaggtgagccccacgttctgcttcactctccccatctcccccccctccccacccccaattttgtatttatttattttttaattattttgtgcagcgatgggggcggggggggggggggcgcgcgccaggcggggcggggcggggcgaggggcggggcggggcgaggcggagaggtgcggcggcagccaatcagagcggcgcgctccgaaagtttccttttatggcgaggcggcggcggcggcggccctataaaaagcgaagcgcgcggcgggcgggagtcgctgcgttgccttcgccccgtgccccgctccgcgccgcctcgcgccgcccgccccggctctgactgaccgcgttactcccacaggtgagcgggcgggacggcccttctcctccgggctgtaattagcgcttggtttaatgacggctcgtttcttttctgtggctgcgtgaaagccttaaagggctccgggagggccctttgtgcgggggggagcggctcggggggtgcgtgcgtgtgtgtgtgcgtggggagcgccgcgtgcggcccgcgctgcccggcggctgtgagcgctgcgggcgcggcgcggggctttgtgcgctccgcgtgtgcgcgaggggagcgcggccgggggcggtgccccgcggtgcgggggggctgcgaggggaacaaaggctgcgtgcggggtgtgtgcgtgggggggtgagcagggggtgtgggcgcggcggtcgggctgtaacccccccctgcacccccctccccgagttgctgagcacggcccggcttcgggtgcggggctccgtgcggggcgtggcgcggggctcgccgtgccgggcggggggtggcggcaggtgggggtgccgggcggggcggggccgcctcgggccggggagggctcgggggaggggcgcggcggcccccggagcgccggcgagggtcggcaggccgcagagtgtgactcctgttctgtgtttgagaatcctgatggagcgggtgaacagtctcagtcccgctcccaggaaatggtcaaaaacagagcagagacagatccacgagggcctccggagcacctttctagagcctctgctaaccatgttcatgccttcttctttttcctacagctcctgggcaacgtgctggttattgtgaccggtcgctagccaccatggtgagcaagggcgaggagctgttcaccggggtggtgcccatcctggtcgagctggacggcgacgtaaacggccacaagttcagcgtgtccggcgagggcgagggcgatgccacctacggcaagctgaccctgaagttcatctgcaccaccggcaagctgcccgtgccctggcccaccctcgtgaccaccctgacctacggcgtgcagtgcttcagccgctaccccgaccacatgaagcagcacgacttcttcaagtccgccatgcccgaaggctacgtccaggagcgcaccatcttcttcaaggacgacggcaactacaagacccgcgccgaggtgaagttcgagggcgacaccctggtgaaccgcatcgagctgaagggcatcgacttcaaggaggacggcaacatcctggggcacaagctggagtacaactacaacagccacaacgtctatatcatggccgacaagcagaagaacggcatcaaggtgaacttcaagatccgccacaacatcgaggacggcagcgtgcagctcgccgaccactaccagcagaacacccccatcggcgacggccccgtgctgctgcccgacaaccactacctgagcacccagtccgccctgagcaaagaccccaacgagaagcgcgatcacatggtcctgctggagttcgtgaccgccgccgggatcactctcggcatggacgagctgtacaagtaacctgcaggcgccggcgagggtcggcaggccgcagagtgtgactcctgttctgtgtttgagaatcctgatggagcgggtgaacagtctcagtcccgctcccaggaaatggtcaaaaacagagcagagacagatccacgagggcctccggagcaccttgagctcgctgatcagcctcgactgtgccttctagttgccagccatctgttgtttgcccctcccccgtgccttccttgaccctggaaggtgccactcccactgtcctttcctaataaaatgaggaaattgcatcgcattgtctgagtaggtgtcattctattctggggggtggggtggggcaggacagcaagggggaggattgggaagacaatagcaggcatgctggggatgcggtgggctctatggaagcttgaattcagctgacgtgcctcggaccgctaggaacccctagtgatggagttggccactccctctctgcgcgctcgctcgctcactgaggccgggcgaccaaaggtcgcccgacgcccgggctttgcccgggcggcctcagtgagcgagcgagcgcgcag

SEQ ID NO: 243 - DNA, 2943 bp, Artificial Sequence
  source: /note="Description of Artificial Sequence: Synthetic polynucleotide"
cctgcaggcagctgcgcgctcgctcgctcactgaggccgcccgggcgtcgggcgacctttggtcgcccggcctcagtgagcgagcgagcgcgcagagagggagtggccaactccatcactaggggttcctgcggccgcacgcgtgacattgattattgactagttattaatagtaatcaattacggggtcattagttcatagcccatatatggagttccgcgttacataacttacggtaaatggcccgcctggctgaccgcccaacgacccccgcccattgacgtcaataatgacgtatgttcccatagtaacgccaatagggactttccattgacgtcaatgggtggactatttacggtaaactgcccacttggcagtacatcaagtgtatcatatgccaagtacgccccctattgacgtcaatgacggtaaatggcccgcctggcattatgcccagtacatgaccttatgggactttcctacttggcagtacatctacgtattagtcatcgctattaccatgggtcgaggtgagccccacgttctgcttcactctccccatctcccccccctccccacccccaattttgtatttatttattttttaattattttgtgcagcgatgggggcggggggggggggggcgcgcgccaggcggggcggggcggggcgaggggcggggcggggcgaggcggagaggtgcggcggcagccaatcagagcggcgcgctccgaaagtttccttttatggcgaggcggcggcggcggcggccctataaaaagcgaagcgcgcggcgggcgggagtcgctgcgttgccttcgccccgtgccccgctccgcgccgcctcgcgccgcccgccccggctctgactgaccgcgttactcccacaggtgagcgggcgggacggcccttctcctccgggctgtaattagcgcttggtttaatgacggctcgtttcttttctgtggctgcgtgaaagccttaaagggctccgggagggccctttgtgcgggggggagcggctcggggggtgcgtgcgtgtgtgtgtgcgtggggagcgccgcgtgcggcccgcgctgcccggcggctgtgagcgctgcgggcgcggcgcggggctttgtgcgctccgcgtgtgcgcgaggggagcgcggccgggggcggtgccccgcggtgcgggggggctgcgaggggaacaaaggctgcgtgcggggtgtgtgcgtgggggggtgagcagggggtgtgggcgcggcggtcgggctgtaacccccccctgcacccccctccccgagttgctgagcacggcccggcttcgggtgcggggctccgtgcggggcgtggcgcggggctcgccgtgccgggcggggggtggcggcaggtgggggtgccgggcggggcggggccgcctcgggccggggagggctcgggggaggggcgcggcggcccccggagcgccggcggaaacagattggaaatgatttgttttgagcgggggttgagaatcctgatggagcgggtttgtcataaaccccgctccctcaggattcccaacctcctctcatttgctatattcaattaagtaatctagagcctctgctaaccatgttcatgccttcttctttttcctacagctcctgggcaacgtgctggttattgtgaccggtcgctagccaccatggtgagcaagggcgaggagctgttcaccggggtggtgcccatcctggtcgagctggacggcgacgtaaacggccacaagttcagcgtgtccggcgagggcgagggcgatgccacctacggcaagctgaccctgaagttcatctgcaccaccggcaagctgcccgtgccctggcccaccctcgtgaccaccctgacctacggcgtgcagtgcttcagccgctaccccgaccacatgaagcagcacgacttcttcaagtccgccatgcccgaaggctacgtccaggagcgcaccatcttcttcaaggacgacggcaactacaagacccgcgccgaggtgaagttcgagggcgacaccctggtgaaccgcatcgagctgaagggcatcgacttcaaggaggacggcaacatcctggggcacaagctggagtacaactacaacagccacaacgtctatatcatggccgacaagcagaagaacggcatcaaggtgaacttcaagatccgccacaacatcgaggacggcagcgtgcagctcgccgaccactaccagcagaacacccccatcggcgacggccccgtgctgctgcccgacaaccactacctgagcacccagtccgccctgagcaaagaccccaacgagaagcgcgatcacatggtcctgctggagttcgtgaccgccgccgggatcactctcggcatggacgagctgtacaagtaacctgcaggcgccggcggaaacagattggaaatgatttgttttgagcgggggttgagaatcctgatggagcgggtttgtcataaaccccgctccctcaggattcccaacctcctctcatttgctatattcaattaagtaagagctcgctgatcagcctcgactgtgccttctagttgccagccatctgttgtttgcccctcccccgtgccttccttgaccctggaaggtgccactcccactgtcctttcctaataaaatgaggaaattgcatcgcattgtctgagtaggtgtcattctattctggggggtggggtggggcaggacagcaagggggaggattgggaagacaatagcaggcatgctggggatgcggtgggctctatggaagcttgaattcagctgacgtgcctcggaccgctaggaacccctagtgatggagttggccactccctctctgcgcgctcgctcgctcactgaggccgggcgaccaaaggtcgcccgacgcccgggctttgcccgggcggcctcagtgagcgagcgagcgcgcag

SEQ ID NO: 244 - DNA, 2901 bp, Artificial Sequence
  source: /note="Description of Artificial Sequence: Synthetic polynucleotide"
cctgcaggcagctgcgcgctcgctcgctcactgaggccgcccgggcgtcgggcgacctttggtcgcccggcctcagtgagcgagcgagcgcgcagagagggagtggccaactccatcactaggggttcctgcggccgcacgcgtgacattgattattgactagttattaatagtaatcaattacggggtcattagttcatagcccatatatggagttccgcgttacataacttacggtaaatggcccgcctggctgaccgcccaacgacccccgcccattgacgtcaataatgacgtatgttcccatagtaacgccaatagggactttccattgacgtcaatgggtggactatttacggtaaactgcccacttggcagtacatcaagtgtatcatatgccaagtacgccccctattgacgtcaatgacggtaaatggcccgcctggcattatgcccagtacatgaccttatgggactttcctacttggcagtacatctacgtattagtcatcgctattaccatgggtcgaggtgagccccacgttctgcttcactctccccatctcccccccctccccacccccaattttgtatttatttattttttaattattttgtgcagcgatgggggcggggggggggggggcgcgcgccaggcggggcggggcggggcgaggggcggggcggggcgaggcggagaggtgcggcggcagccaatcagagcggcgcgctccgaaagtttccttttatggcgaggcggcggcggcggcggccctataaaaagcgaagcgcgcggcgggcgggagtcgctgcgttgccttcgccccgtgccccgctccgcgccgcctcgcgccgcccgccccggctctgactgaccgcgttactcccacaggtgagcgggcgggacggcccttctcctccgggctgtaattagcgcttggtttaatgacggctcgtttcttttctgtggctgcgtgaaagccttaaagggctccgggagggccctttgtgcgggggggagcggctcggggggtgcgtgcgtgtgtgtgtgcgtggggagcgccgcgtgcggcccgcgctgcccggcggctgtgagcgctgcgggcgcggcgcggggctttgtgcgctccgcgtgtgcgcgaggggagcgcggccgggggcggtgccccgcggtgcgggggggctgcgaggggaacaaaggctgcgtgcggggtgtgtgcgtgggggggtgagcagggggtgtgggcgcggcggtcgggctgtaacccccccctgcacccccctccccgagttgctgagcacggcccggcttcgggtgcggggctccgtgcggggcgtggcgcggggctcgccgtgccgggcggggggtggcggcaggtgggggtgccgggcggggcggggccgcctcgggccggggagggctcgggggaggggcgcggcggcccccggagcgccggcgtgactgccagggcacttgggaatggcaaggttgagaatcctgatggagcggattccatcaggattctcagtcttgctatacccagaaaacgtgccaggaagatctagagcctctgctaaccatgttcatgccttcttctttttcctacagctcctgggcaacgtgctggttattgtgaccggtcgctagccaccatggtgagcaagggcgaggagctgttcaccggggtggtgcccatcctggtcgagctggacggcgacgtaaacggccacaagttcagcgtgtccggcgagggcgagggcgatgccacctacggcaagctgaccctgaagttcatctgcaccaccggcaagctgcccgtgccctggcccaccctcgtgaccaccctgacctacggcgtgcagtgcttcagccgctaccccgaccacatgaagcagcacgacttcttcaagtccgccatgcccgaaggctacgtccaggagcgcaccatcttcttcaaggacgacggcaactacaagacccgcgccgaggtgaagttcgagggcgacaccctggtgaaccgcatcgagctgaagggcatcgacttcaaggaggacggcaacatcctggggcacaagctggagtacaactacaacagccacaacgtctatatcatggccgacaagcagaagaacggcatcaaggtgaacttcaagatccgccacaacatcgaggacggcagcgtgcagctcgccgaccactaccagcagaacacccccatcggcgacggccccgtgctgctgcccgacaaccactacctgagcacccagtccgccctgagcaaagaccccaacgagaagcgcgatcacatggtcctgctggagttcgtgaccgccgccgggatcactctcggcatggacgagctgtacaagtaacctgcaggcgccggcgtgactgccagggcacttgggaatggcaaggttgagaatcctgatggagcggattccatcaggattctcagtcttgctatacccagaaaacgtgccaggaagagagctcgctgatcagcctcgactgtgccttctagttgccagccatctgttgtttgcccctcccccgtgccttccttgaccctggaaggtgccactcccactgtcctttcctaataaaatgaggaaattgcatcgcattgtctgagtaggtgtcattctattctggggggtggggtggggcaggacagcaagggggaggattgggaagacaatagcaggcatgctggggatgcggtgggctctatggaagcttgaattcagctgacgtgcctcggaccgctaggaacccctagtgatggagttggccactccctctctgcgcgctcgctcgctcactgaggccgggcgaccaaaggtcgcccgacgcccgggctttgcccgggcggcctcagtgagcgagcgagcgcgcag

SEQ ID NO: 245 - DNA, 2978 bp, Artificial Sequence
  source: /note="Description of Artificial Sequence: Synthetic polynucleotide"
ctgcgcgctcgctcgctcactgaggccgcccgggcgtcgggcgacctttggtcgcccggcctcagtgagcgagcgagcgcgcagagagggagtggccaactccatcactaggggttcctgcggccgcacgcgtgacattgattattgactagttattaatagtaatcaattacggggtcattagttcatagcccatatatggagttccgcgttacataacttacggtaaatggcccgcctggctgaccgcccaacgacccccgcccattgacgtcaataatgacgtatgttcccatagtaacgccaatagggactttccattgacgtcaatgggtggactatttacggtaaactgcccacttggcagtacatcaagtgtatcatatgccaagtacgccccctattgacgtcaatgacggtaaatggcccgcctggcattatgcccagtacatgaccttatgggactttcctacttggcagtacatctacgtattagtcatcgctattaccatgggtcgaggtgagccccacgttctgcttcactctccccatctcccccccctccccacccccaattttgtatttatttattttttaattattttgtgcagcgatgggggcggggggggggggggcgcgcgccaggcggggcggggcggggcgaggggcggggcggggcgaggcggagaggtgcggcggcagccaatcagagcggcgcgctccgaaagtttccttttatggcgaggcggcggcggcggcggccctataaaaagcgaagcgcgcggcgggcgggagtcgctgcgttgccttcgccccgtgccccgctccgcgccgcctcgcgccgcccgccccggctctgactgaccgcgttactcccacaggtgagcgggcgggacggcccttctcctccgggctgtaattagcgcttggtttaatgacggctcgtttcttttctgtggctgcgtgaaagccttaaagggctccgggagggccctttgtgcgggggggagcggctcggggggtgcgtgcgtgtgtgtgtgcgtggggagcgccgcgtgcggcccgcgctgcccggcggctgtgagcgctgcgggcgcggcgcggggctttgtgcgctccgcgtgtgcgcgaggggagcgcggccgggggcggtgccccgcggtgcgggggggctgcgaggggaacaaaggctgcgtgcggggtgtgtgcgtgggggggtgagcagggggtgtgggcgcggcggtcgggctgtaacccccccctgcacccccctccccgagttgctgagcacggcccggcttcgggtgcggggctccgtgcggggcgtggcgcggggctcgccgtgccgggcggggggtggcggcaggtgggggtgccgggcggggcggggccgcctcgggccggggagggctcgggggaggggcgcggcggcccccggagcgccggcggagcaggaggaccaaggccctggcgaaggccgtggcctcgatgctgtcatagtaataccagtgtgcaggtcccaatggctggtattaatgtgacagtctcggggacgcgggcctggacgccggcatccgggctcaggacccccctctctagagcctctgctaaccatgttcatgccttcttctttttcctacagctcctgggcaacgtgctggttattgtgaccggtcgctagccaccatggtgagcaagggcgaggagctgttcaccggggtggtgcccatcctggtcgagctggacggcgacgtaaacggccacaagttcagcgtgtccggcgagggcgagggcgatgccacctacggcaagctgaccctgaagttcatctgcaccaccggcaagctgcccgtgccctggcccaccctcgtgaccaccctgacctacggcgtgcagtgcttcagccgctaccccgaccacatgaagcagcacgacttcttcaagtccgccatgcccgaaggctacgtccaggagcgcaccatcttcttcaaggacgacggcaactacaagacccgcgccgaggtgaagttcgagggcgacaccctggtgaaccgcatcgagctgaagggcatcgacttcaaggaggacggcaacatcctggggcacaagctggagtacaactacaacagccacaacgtctatatcatggccgacaagcagaagaacggcatcaaggtgaacttcaagatccgccacaacatcgaggacggcagcgtgcagctcgccgaccactaccagcagaacacccccatcggcgacggccccgtgctgctgcccgacaaccactacctgagcacccagtccgccctgagcaaagaccccaacgagaagcgcgatcacatggtcctgctggagttcgtgaccgccgccgggatcactctcggcatggacgagctgtacaagtaacctgcaggcgccggcggagcaggaggaccaaggccctggcgaaggccgtggcctcgatgctgtcatagtaataccagtgtgcaggtcccaatggctggtattaatgtgacagtctcggggacgcgggcctggacgccggcatccgggctcaggacccccctcgagctcgctgatcagcctcgactgtgccttctagttgccagccatctgttgtttgcccctcccccgtgccttccttgaccctggaaggtgccactcccactgtcctttcctaataaaatgaggaaattgcatcgcattgtctgagtaggtgtcattctattctggggggtggggtggggcaggacagcaagggggaggattgggaagacaatagcaggcatgctggggatgcggtgggctctatggaagcttgaattcagctgacgtgcctcggaccgctaggaacccctagtgatggagttggccactccctctctgcgcgctcgctcgctcactgaggccgggcgaccaaaggtcgcccgacgcccgggctttgcccgggcggcctcagtgagcgagcgagcgcgcag

SEQ ID NO: 246 - DNA, 4346 bp, Artificial Sequence
  source: /note="Description of Artificial Sequence: Synthetic polynucleotide"
ctgcgcgctcgctcgctcactgaggccgcccgggcgtcgggcgacctttggtcgcccggcctcagtgagcgagcgagcgcgcagagagggagtggccaactccatcactaggggttcctgcggccgcacgcgtgacattgattattgactagttattaatagtaatcaattacggggtcattagttcatagcccatatatggagttccgcgttacataacttacggtaaatggcccgcctggctgaccgcccaacgacccccgcccattgacgtcaataatgacgtatgttcccatagtaacgccaatagggactttccattgacgtcaatgggtggactatttacggtaaactgcccacttggcagtacatcaagtgtatcatatgccaagtacgccccctattgacgtcaatgacggtaaatggcccgcctggcattatgcccagtacatgaccttatgggactttcctacttggcagtacatctacgtattagtcatcgctattaccatgggtcgaggtgagccccacgttctgcttcactctccccatctcccccccctccccacccccaattttgtatttatttattttttaattattttgtgcagcgatgggggcggggggggggggggcgcgcgccaggcggggcggggcggggcgaggggcggggcggggcgaggcggagaggtgcggcggcagccaatcagagcggcgcgctccgaaagtttccttttatggcgaggcggcggcggcggcggccctataaaaagcgaagcgcgcggcgggcgggagtcgctgcgttgccttcgccccgtgccccgctccgcgccgcctcgcgccgcccgccccggctctgactgaccgcgttactcccacaggtgagcgggcgggacggcccttctcctccgggctgtaattagcgcttggtttaatgacggctcgtttcttttctgtggctgcgtgaaagccttaaagggctccgggagggccctttgtgcgggggggagcggctcggggggtgcgtgcgtgtgtgtgtgcgtggggagcgccgcgtgcggcccgcgctgcccggcggctgtgagcgctgcgggcgcggcgcggggctttgtgcgctccgcgtgtgcgcgaggggagcgcggccgggggcggtgccccgcggtgcgggggggctgcgaggggaacaaaggctgcgtgcggggtgtgtgcgtgggggggtgagcagggggtgtgggcgcggcggtcgggctgtaacccccccctgcacccccctccccgagttgctgagcacggcccggcttcgggtgcggggctccgtgcggggcgtggcgcggggctcgccgtgccgggcggggggtggcggcaggtgggggtgccgggcggggcggggccgcctcgggccggggagggctcgggggaggggcgcggcggcccccggagcgccggcggagcaggaggaccaaggccctggcgaaggccgtggcctcgatgctgtcatagtaataccagtgtgcaggtcccaatggctggtattaatgtgacagtctcggggacgcgggcctggacgccggcatccgggctcaggacccccctctctagagcctctgctaaccatgttcatgccttcttctttttcctacagctcctgggcaacgtgctggttattgtgaccggtcgctagccaccatggctgaagcccctcctagaaggcttggactgggacctcctcctggggatgctcctagagctgaactggtggctctgacagccgtgcagtctgaacaaggcgaagctggtggcggcggatctccacgtagacttggactgctgggaagccctcttcctcctggtgctccacttcctggacctggcagtggatctggatctgcctgtggccagagaagctctgccgctcacaagagataccggcggctgcagaactgggtgtacaacgtgctggaaagacccagaggctgggccttcgtgtaccacgtgttcatctttctgctggtgttcagctgcctggtgctgtccgtgctgagcaccatccaagaacatcaagagctggctaacgagtgcctgttaatactggagtttgtgatgattgtggtgttcggcctcgagtacatcgtccgcgtttggagcgccggctgctgctgcagatatagaggttggcaaggcagattccgcttcgccagaaagcccttctgcgtgatcgacttcatcgtgttcgtggccagcgtggccgtgattgctgctggcacacagggcaacatcttcgccacaagcgccctgcggagcatgcggtttctgcagatcctgagaatggtccgaatggacagaagaggcggcacctggaagctgctgggctctgtggtgtacgcccacagcaaagagctgatcaccgcctggtacatcggatttctggtgctgatcttcgcctccttcctggtgtacctggccgagaaggacgccaacagcgactttagcagctacgccgactctctttggtggggcaccatcacactgaccaccatcggctacggcgacaagacccctcacacatggctgggaagagtgctggccgctggatttgctctgctgggcatcagctttttcgccctgcctgccggaatcctcggatctggctttgccctgaaggtgcaagagcagcatagacaaaagcattttgaaaagagaagaatgcctgccgccaacctgattcaggccgcttggagactgtacagcaccgacatgagcagagcctacctgaccgccacgtggtattattacgattcgatcctgcctagcttccgcgaactggccctgctgtttgagcatgtgcagagagccagaaacggcggcctcagacctctggaagttcggagagcacctgtgcctgatggcgccccttctagatatcctccagtggccacctgtcacagacccggcagcacatctttttgccctggcgagtctagccggatgggcatcaaggacagaatcagaatgggcagcagccagcggagaacaggcccttctaaacagcatctggcccctccaaccatgcctacaagccctagctctgagcaagtgggcgaagccacctctcctaccaaggtgcagaagtcctggtccttcaacgaccggaccagatttagagccagcctccggctgaagcccagaacctctgccgaggatgccccttctgaagaggtggccgaagagaagtcctaccagtgcgagctgaccgtggacgacatcatgccagccgtgaaaaccgtgataaggtctatacgcatcctgaagttcctggtggccaagcggaagttcaaagagacactgcggccctacgacgtgaaggacgtgatcgagcagtattctgccggccacctggacatgctgggcagaatcaagagcctgcagaccagagtggaccagatcgttggaagaggcccaggcgacagaaaggccagagagaagggcgataagggcccatctgatgccgaggttgtcgacgagatatcaatgatgggcagagtcgtgaaagtcgaaaaacaggtgcagagcatcgagcacaagctggacctgctgctgggattctacagccggtgtctgagaagcggcacatctgcatctctgggcgctgtgcaggtcccactgttcgatcctgatattacgagcgattatcacagccccgtggaccacgaggacatctccgtttctgctcagaccctgagcatcagcagatccgtgtccaccaacatggactaacctgcaggcgccggcggagcaggaggaccaaggccctggcgaaggccgtggcctcgatgctgtcatagtaataccagtgtgcaggtcccaatggctggtattaatgtgacagtctcggggacgcgggcctggacgccggcatccgggctcaggacccccctcgagctcgctgatcagcctcgactgtgccttctagttgccagccatctgttgtttgcccctcccccgtgccttccttgaccctggaaggtgccactcccactgtcctttcctaataaaatgaggaaattgcatcgcattgtctgagtaggtgtcattctattctggggggtggggtggggcaggacagcaagggggaggattgggaagacaatagcaggcatgctggggatgcggtgggctctatggaagcttgaattcagctgacgtgcctcggaccgctaggaacccctagtgatggagttggccactccctctctgcgcgctcgctcgctcactgaggccgggcgaccaaaggtcgcccgacgcccgggctttgcccgggcggcctcagtgagcgagcgagcgcgcag

SEQ ID NO: 247 - DNA, 2978 bp, Artificial Sequence
  source: /note="Description of Artificial Sequence: Synthetic polynucleotide"
ctgcgcgctcgctcgctcactgaggccgcccgggcgtcgggcgacctttggtcgcccggcctcagtgagcgagcgagcgcgcagagagggagtggccaactccatcactaggggttcctgcggccgcacgcgtgacattgattattgactagttattaatagtaatcaattacggggtcattagttcatagcccatatatggagttccgcgttacataacttacggtaaatggcccgcctggctgaccgcccaacgacccccgcccattgacgtcaataatgacgtatgttcccatagtaacgccaatagggactttccattgacgtcaatgggtggactatttacggtaaactgcccacttggcagtacatcaagtgtatcatatgccaagtacgccccctattgacgtcaatgacggtaaatggcccgcctggcattatgcccagtacatgaccttatgggactttcctacttggcagtacatctacgtattagtcatcgctattaccatgggtcgaggtgagccccacgttctgcttcactctccccatctcccccccctccccacccccaattttgtatttatttattttttaattattttgtgcagcgatgggggcggggggggggggggcgcgcgccaggcggggcggggcggggcgaggggcggggcggggcgaggcggagaggtgcggcggcagccaatcagagcggcgcgctccgaaagtttccttttatggcgaggcggcggcggcggcggccctataaaaagcgaagcgcgcggcgggcgggagtcgctgcgttgccttcgccccgtgccccgctccgcgccgcctcgcgccgcccgccccggctctgactgaccgcgttactcccacaggtgagcgggcgggacggcccttctcctccgggctgtaattagcgcttggtttaatgacggctcgtttcttttctgtggctgcgtgaaagccttaaagggctccgggagggccctttgtgcgggggggagcggctcggggggtgcgtgcgtgtgtgtgtgcgtggggagcgccgcgtgcggcccgcgctgcccggcggctgtgagcgctgcgggcgcggcgcggggctttgtgcgctccgcgtgtgcgcgaggggagcgcggccgggggcggtgccccgcggtgcgggggggctgcgaggggaacaaaggctgcgtgcggggtgtgtgcgtgggggggtgagcagggggtgtgggcgcggcggtcgggctgtaacccccccctgcacccccctccccgagttgctgagcacggcccggcttcgggtgcggggctccgtgcggggcgtggcgcggggctcgccgtgccgggcggggggtggcggcaggtgggggtgccgggcggggcggggccgcctcgggccggggagggctcgggggaggggcgcggcggcccccggagcgccggcggagcaggaggaccaaggccctggcgaaggccgtggcctcgttgagtcttagagaggcccggtgtgcaggtcccaatggccgggtcttactgagattccacggggacgcgggcctggacgccggcatccgggctcaggacccccctctctagagcctctgctaaccatgttcatgccttcttctttttcctacagctcctgggcaacgtgctggttattgtgaccggtcgctagccaccatggtgagcaagggcgaggagctgttcaccggggtggtgcccatcctggtcgagctggacggcgacgtaaacggccacaagttcagcgtgtccggcgagggcgagggcgatgccacctacggcaagctgaccctgaagttcatctgcaccaccggcaagctgcccgtgccctggcccaccctcgtgaccaccctgacctacggcgtgcagtgcttcagccgctaccccgaccacatgaagcagcacgacttcttcaagtccgccatgcccgaaggctacgtccaggagcgcaccatcttcttcaaggacgacggcaactacaagacccgcgccgaggtgaagttcgagggcgacaccctggtgaaccgcatcgagctgaagggcatcgacttcaaggaggacggcaacatcctggggcacaagctggagtacaactacaacagccacaacgtctatatcatggccgacaagcagaagaacggcatcaaggtgaacttcaagatccgccacaacatcgaggacggcagcgtgcagctcgccgaccactaccagcagaacacccccatcggcgacggccccgtgctgctgcccgacaaccactacctgagcacccagtccgccctgagcaaagaccccaacgagaagcgcgatcacatggtcctgctggagttcgtgaccgccgccgggatcactctcggcatggacgagctgtacaagtaacctgcaggcgccggcggagcaggaggaccaaggccctggcgaaggccgtggcctcgatgctgtcatagtaataccagtgtgcaggtcccaatggctggtattaatgtgacagtctcggggacgcgggcctggacgccggcatccgggctcaggacccccctcgagctcgctgatcagcctcgactgtgccttctagttgccagccatctgttgtttgcccctcccccgtgccttccttgaccctggaaggtgccactcccactgtcctttcctaataaaatgaggaaattgcatcgcattgtctgagtaggtgtcattctattctggggggtggggtggggcaggacagcaagggggaggattgggaagacaatagcaggcatgctggggatgcggtgggctctatggaagcttgaattcagctgacgtgcctcggaccgctaggaacccctagtgatggagttggccactccctctctgcgcgctcgctcgctcactgaggccgggcgaccaaaggtcgcccgacgcccgggctttgcccgggcggcctcagtgagcgagcgagcgcgcag

SEQ ID NO: 248 - DNA, 4346 bp, Artificial Sequence
  source: /note="Description of Artificial Sequence: Synthetic polynucleotide"
ctgcgcgctcgctcgctcactgaggccgcccgggcgtcgggcgacctttggtcgcccggcctcagtgagcgagcgagcgcgcagagagggagtggccaactccatcactaggggttcctgcggccgcacgcgtgacattgattattgactagttattaatagtaatcaattacggggtcattagttcatagcccatatatggagttccgcgttacataacttacggtaaatggcccgcctggctgaccgcccaacgacccccgcccattgacgtcaataatgacgtatgttcccatagtaacgccaatagggactttccattgacgtcaatgggtggactatttacggtaaactgcccacttggcagtacatcaagtgtatcatatgccaagtacgccccctattgacgtcaatgacggtaaatggcccgcctggcattatgcccagtacatgaccttatgggactttcctacttggcagtacatctacgtattagtcatcgctattaccatgggtcgaggtgagccccacgttctgcttcactctccccatctcccccccctccccacccccaattttgtatttatttattttttaattattttgtgcagcgatgggggcggggggggggggggcgcgcgccaggcggggcggggcggggcgaggggcggggcggggcgaggcggagaggtgcggcggcagccaatcagagcggcgcgctccgaaagtttccttttatggcgaggcggcggcggcggcggccctataaaaagcgaagcgcgcggcgggcgggagtcgctgcgttgccttcgccccgtgccccgctccgcgccgcctcgcgccgcccgccccggctctgactgaccgcgttactcccacaggtgagcgggcgggacggcccttctcctccgggctgtaattagcgcttggtttaatgacggctcgtttcttttctgtggctgcgtgaaagccttaaagggctccgggagggccctttgtgcgggggggagcggctcggggggtgcgtgcgtgtgtgtgtgcgtggggagcgccgcgtgcggcccgcgctgcccggcggctgtgagcgctgcgggcgcggcgcggggctttgtgcgctccgcgtgtgcgcgaggggagcgcggccgggggcggtgccccgcggtgcgggggggctgcgaggggaacaaaggctgcgtgcggggtgtgtgcgtgggggggtgagcagggggtgtgggcgcggcggtcgggctgtaacccccccctgcacccccctccccgagttgctgagcacggcccggcttcgggtgcggggctccgtgcggggcgtggcgcggggctcgccgtgccgggcggggggtggcggcaggtgggggtgccgggcggggcggggccgcctcgggccggggagggctcgggggaggggcgcggcggcccccggagcgccggcggagcaggaggaccaaggccctggcgaaggccgtggcctcgttgagtcttagagaggcccggtgtgcaggtcccaatggccgggtcttactgagattccacggggacgcgggcctggacgccggcatccgggctcaggacccccctctctagagcctctgctaaccatgttcatgccttcttctttttcctacagctcctgggcaacgtgctggttattgtgaccggtcgctagccaccatggctgaagcccctcctagaaggcttggactgggacctcctcctggggatgctcctagagctgaactggtggctctgacagccgtgcagtctgaacaaggcgaagctggtggcggcggatctccacgtagacttggactgctgggaagccctcttcctcctggtgctccacttcctggacctggcagtggatctggatctgcctgtggccagagaagctctgccgctcacaagagataccggcggctgcagaactgggtgtacaacgtgctggaaagacccagaggctgggccttcgtgtaccacgtgttcatctttctgctggtgttcagctgcctggtgctgtccgtgctgagcaccatccaagaacatcaagagctggctaacgagtgcctgttaatactggagtttgtgatgattgtggtgttcggcctcgagtacatcgtccgcgtttggagcgccggctgctgctgcagatatagaggttggcaaggcagattccgcttcgccagaaagcccttctgcgtgatcgacttcatcgtgttcgtggccagcgtggccgtgattgctgctggcacacagggcaacatcttcgccacaagcgccctgcggagcatgcggtttctgcagatcctgagaatggtccgaatggacagaagaggcggcacctggaagctgctgggctctgtggtgtacgcccacagcaaagagctgatcaccgcctggtacatcggatttctggtgctgatcttcgcctccttcctggtgtacctggccgagaaggacgccaacagcgactttagcagctacgccgactctctttggtggggcaccatcacactgaccaccatcggctacggcgacaagacccctcacacatggctgggaagagtgctggccgctggatttgctctgctgggcatcagctttttcgccctgcctgccggaatcctcggatctggctttgccctgaaggtgcaagagcagcatagacaaaagcattttgaaaagagaagaatgcctgccgccaacctgattcaggccgcttggagactgtacagcaccgacatgagcagagcctacctgaccgccacgtggtattattacgattcgatcctgcctagcttccgcgaactggccctgctgtttgagcatgtgcagagagccagaaacggcggcctcagacctctggaagttcggagagcacctgtgcctgatggcgccccttctagatatcctccagtggccacctgtcacagacccggcagcacatctttttgccctggcgagtctagccggatgggcatcaaggacagaatcagaatgggcagcagccagcggagaacaggcccttctaaacagcatctggcccctccaaccatgcctacaagccctagctctgagcaagtgggcgaagccacctctcctaccaaggtgcagaagtcctggtccttcaacgaccggaccagatttagagccagcctccggctgaagcccagaacctctgccgaggatgccccttctgaagaggtggccgaagagaagtcctaccagtgcgagctgaccgtggacgacatcatgccagccgtgaaaaccgtgataaggtctatacgcatcctgaagttcctggtggccaagcggaagttcaaagagacactgcggccctacgacgtgaaggacgtgatcgagcagtattctgccggccacctggacatgctgggcagaatcaagagcctgcagaccagagtggaccagatcgttggaagaggcccaggcgacagaaaggccagagagaagggcgataagggcccatctgatgccgaggttgtcgacgagatatcaatgatgggcagagtcgtgaaagtcgaaaaacaggtgcagagcatcgagcacaagctggacctgctgctgggattctacagccggtgtctgagaagcggcacatctgcatctctgggcgctgtgcaggtcccactgttcgatcctgatattacgagcgattatcacagccccgtggaccacgaggacatctccgtttctgctcagaccctgagcatcagcagatccgtgtccaccaacatggactaacctgcaggcgccggcggagcaggaggaccaaggccctggcgaaggccgtggcctcgatgctgtcatagtaataccagtgtgcaggtcccaatggctggtattaatgtgacagtctcggggacgcgggcctggacgccggcatccgggctcaggacccccctcgagctcgctgatcagcctcgactgtgccttctagttgccagccatctgttgtttgcccctcccccgtgccttccttgaccctggaaggtgccactcccactgtcctttcctaataaaatgaggaaattgcatcgcattgtctgagtaggtgtcattctattctggggggtggggtggggcaggacagcaagggggaggattgggaagacaatagcaggcatgctggggatgcggtgggctctatggaagcttgaattcagctgacgtgcctcggaccgctaggaacccctagtgatggagttggccactccctctctgcgcgctcgctcgctcactgaggccgggcgaccaaaggtcgcccgacgcccgggctttgcccgggcggcctcagtgagcgagcgagcgcgcag

SEQ ID NO: 249 - DNA, 2978 bp, Artificial Sequence
  source: /note="Description of Artificial Sequence: Synthetic polynucleotide"
ctgcgcgctcgctcgctcactgaggccgcccgggcgtcgggcgacctttggtcgcccggcctcagtgagcgagcgagcgcgcagagagggagtggccaactccatcactaggggttcctgcggccgcacgcgtgacattgattattgactagttattaatagtaatcaattacggggtcattagttcatagcccatatatggagttccgcgttacataacttacggtaaatggcccgcctggctgaccgcccaacgacccccgcccattgacgtcaataatgacgtatgttcccatagtaacgccaatagggactttccattgacgtcaatgggtggactatttacggtaaactgcccacttggcagtacatcaagtgtatcatatgccaagtacgccccctattgacgtcaatgacggtaaatggcccgcctggcattatgcccagtacatgaccttatgggactttcctacttggcagtacatctacgtattagtcatcgctattaccatgggtcgaggtgagccccacgttctgcttcactctccccatctcccccccctccccacccccaattttgtatttatttattttttaattattttgtgcagcgatgggggcggggggggggggggcgcgcgccaggcggggcggggcggggcgaggggcggggcggggcgaggcggagaggtgcggcggcagccaatcagagcggcgcgctccgaaagtttccttttatggcgaggcggcggcggcggcggccctataaaaagcgaagcgcgcggcgggcgggagtcgctgcgttgccttcgccccgtgccccgctccgcgccgcctcgcgccgcccgccccggctctgactgaccgcgttactcccacaggtgagcgggcgggacggcccttctcctccgggctgtaattagcgcttggtttaatgacggctcgtttcttttctgtggctgcgtgaaagccttaaagggctccgggagggccctttgtgcgggggggagcggctcggggggtgcgtgcgtgtgtgtgtgcgtggggagcgccgcgtgcggcccgcgctgcccggcggctgtgagcgctgcgggcgcggcgcggggctttgtgcgctccgcgtgtgcgcgaggggagcgcggccgggggcggtgccccgcggtgcgggggggctgcgaggggaacaaaggctgcgtgcggggtgtgtgcgtgggggggtgagcagggggtgtgggcgcggcggtcgggctgtaacccccccctgcacccccctccccgagttgctgagcacggcccggcttcgggtgcggggctccgtgcggggcgtggcgcggggctcgccgtgccgggcggggggtggcggcaggtgggggtgccgggcggggcggggccgcctcgggccggggagggctcgggggaggggcgcggcggcccccggagcgccggcggagcaggaggaccaaggccctggcgaaggccgtggcctcgttttccaccttgactacgcgctgtgcaggtcccaatgggcgtgtagtagaggtggagcacggggacgcgggcctggacgccggcatccgggctcaggacccccctctctagagcctctgctaaccatgttcatgccttcttctttttcctacagctcctgggcaacgtgctggttattgtgaccggtcgctagccaccatggtgagcaagggcgaggagctgttcaccggggtggtgcccatcctggtcgagctggacggcgacgtaaacggccacaagttcagcgtgtccggcgagggcgagggcgatgccacctacggcaagctgaccctgaagttcatctgcaccaccggcaagctgcccgtgccctggcccaccctcgtgaccaccctgacctacggcgtgcagtgcttcagccgctaccccgaccacatgaagcagcacgacttcttcaagtccgccatgcccgaaggctacgtccaggagcgcaccatcttcttcaaggacgacggcaactacaagacccgcgccgaggtgaagttcgagggcgacaccctggtgaaccgcatcgagctgaagggcatcgacttcaaggaggacggcaacatcctggggcacaagctggagtacaactacaacagccacaacgtctatatcatggccgacaagcagaagaacggcatcaaggtgaacttcaagatccgccacaacatcgaggacggcagcgtgcagctcgccgaccactaccagcagaacacccccatcggcgacggccccgtgctgctgcccgacaaccactacctgagcacccagtccgccctgagcaaagaccccaacgagaagcgcgatcacatggtcctgctggagttcgtgaccgccgccgggatcactctcggcatggacgagctgtacaagtaacctgcaggcgccggcggagcaggaggaccaaggccctggcgaaggccgtggcctcgatgctgtcatagtaataccagtgtgcaggtcccaatggctggtattaatgtgacagtctcggggacgcgggcctggacgccggcatccgggctcaggacccccctcgagctcgctgatcagcctcgactgtgccttctagttgccagccatctgttgtttgcccctcccccgtgccttccttgaccctggaaggtgccactcccactgtcctttcctaataaaatgaggaaattgcatcgcattgtctgagtaggtgtcattctattctggggggtggggtggggcaggacagcaagggggaggattgggaagacaatagcaggcatgctggggatgcggtgggctctatggaagcttgaattcagctgacgtgcctcggaccgctaggaacccctagtgatggagttggccactccctctctgcgcgctcgctcgctcactgaggccgggcgaccaaaggtcgcccgacgcccgggctttgcccgggcggcctcagtgagcgagcgagcgcgcag

SEQ ID NO: 250 - DNA, 4346 bp, Artificial Sequence
  source: /note="Description of Artificial Sequence: Synthetic polynucleotide"
ctgcgcgctcgctcgctcactgaggccgcccgggcgtcgggcgacctttggtcgcccggcctcagtgagcgagcgagcgcgcagagagggagtggccaactccatcactaggggttcctgcggccgcacgcgtgacattgattattgactagttattaatagtaatcaattacggggtcattagttcatagcccatatatggagttccgcgttacataacttacggtaaatggcccgcctggctgaccgcccaacgacccccgcccattgacgtcaataatgacgtatgttcccatagtaacgccaatagggactttccattgacgtcaatgggtggactatttacggtaaactgcccacttggcagtacatcaagtgtatcatatgccaagtacgccccctattgacgtcaatgacggtaaatggcccgcctggcattatgcccagtacatgaccttatgggactttcctacttggcagtacatctacgtattagtcatcgctattaccatgggtcgaggtgagccccacgttctgcttcactctccccatctcccccccctccccacccccaattttgtatttatttattttttaattattttgtgcagcgatgggggcggggggggggggggcgcgcgccaggcggggcggggcggggcgaggggcggggcggggcgaggcggagaggtgcggcggcagccaatcagagcggcgcgctccgaaagtttccttttatggcgaggcggcggcggcggcggccctataaaaagcgaagcgcgcggcgggcgggagtcgctgcgttgccttcgccccgtgccccgctccgcgccgcctcgcgccgcccgccccggctctgactgaccgcgttactcccacaggtgagcgggcgggacggcccttctcctccgggctgtaattagcgcttggtttaatgacggctcgtttcttttctgtggctgcgtgaaagccttaaagggctccgggagggccctttgtgcgggggggagcggctcggggggtgcgtgcgtgtgtgtgtgcgtggggagcgccgcgtgcggcccgcgctgcccggcggctgtgagcgctgcgggcgcggcgcggggctttgtgcgctccgcgtgtgcgcgaggggagcgcggccgggggcggtgccccgcggtgcgggggggctgcgaggggaacaaaggctgcgtgcggggtgtgtgcgtgggggggtgagcagggggtgtgggcgcggcggtcgggctgtaacccccccctgcacccccctccccgagttgctgagcacggcccggcttcgggtgcggggctccgtgcggggcgtggcgcggggctcgccgtgccgggcggggggtggcggcaggtgggggtgccgggcggggcggggccgcctcgggccggggagggctcgggggaggggcgcggcggcccccggagcgccggcggagcaggaggaccaaggccctggcgaaggccgtggcctcgttttccaccttgactacgcgctgtgcaggtcccaatgggcgtgtagtagaggtggagcacggggacgcgggcctggacgccggcatccgggctcaggacccccctctctagagcctctgctaaccatgttcatgccttcttctttttcctacagctcctgggcaacgtgctggttattgtgaccggtcgctagccaccatggctgaagcccctcctagaaggcttggactgggacctcctcctggggatgctcctagagctgaactggtggctctgacagccgtgcagtctgaacaaggcgaagctggtggcggcggatctccacgtagacttggactgctgggaagccctcttcctcctggtgctccacttcctggacctggcagtggatctggatctgcctgtggccagagaagctctgccgctcacaagagataccggcggctgcagaactgggtgtacaacgtgctggaaagacccagaggctgggccttcgtgtaccacgtgttcatctttctgctggtgttcagctgcctggtgctgtccgtgctgagcaccatccaagaacatcaagagctggctaacgagtgcctgttaatactggagtttgtgatgattgtggtgttcggcctcgagtacatcgtccgcgtttggagcgccggctgctgctgcagatatagaggttggcaaggcagattccgcttcgccagaaagcccttctgcgtgatcgacttcatcgtgttcgtggccagcgtggccgtgattgctgctggcacacagggcaacatcttcgccacaagcgccctgcggagcatgcggtttctgcagatcctgagaatggtccgaatggacagaagaggcggcacctggaagctgctgggctctgtggtgtacgcccacagcaaagagctgatcaccgcctggtacatcggatttctggtgctgatcttcgcctccttcctggtgtacctggccgagaaggacgccaacagcgactttagcagctacgccgactctctttggtggggcaccatcacactgaccaccatcggctacggcgacaagacccctcacacatggctgggaagagtgctggccgctggatttgctctgctgggcatcagctttttcgccctgcctgccggaatcctcggatctggctttgccctgaaggtgcaagagcagcatagacaaaagcattttgaaaagagaagaatgcctgccgccaacctgattcaggccgcttggagactgtacagcaccgacatgagcagagcctacctgaccgccacgtggtattattacgattcgatcctgcctagcttccgcgaactggccctgctgtttgagcatgtgcagagagccagaaacggcggcctcagacctctggaagttcggagagcacctgtgcctgatggcgccccttctagatatcctccagtggccacctgtcacagacccggcagcacatctttttgccctggcgagtctagccggatgggcatcaaggacagaatcagaatgggcagcagccagcggagaacaggcccttctaaacagcatctggcccctccaaccatgcctacaagccctagctctgagcaagtgggcgaagccacctctcctaccaaggtgcagaagtcctggtccttcaacgaccggaccagatttagagccagcctccggctgaagcccagaacctctgccgaggatgccccttctgaagaggtggccgaagagaagtcctaccagtgcgagctgaccgtggacgacatcatgccagccgtgaaaaccgtgataaggtctatacgcatcctgaagttcctggtggccaagcggaagttcaaagagacactgcggccctacgacgtgaaggacgtgatcgagcagtattctgccggccacctggacatgctgggcagaatcaagagcctgcagaccagagtggaccagatcgttggaagaggcccaggcgacagaaaggccagagagaagggcgataagggcccatctgatgccgaggttgtcgacgagatatcaatgatgggcagagtcgtgaaagtcgaaaaacaggtgcagagcatcgagcacaagctggacctgctgctgggattctacagccggtgtctgagaagcggcacatctgcatctctgggcgctgtgcaggtcccactgttcgatcctgatattacgagcgattatcacagccccgtggaccacgaggacatctccgtttctgctcagaccctgagcatcagcagatccgtgtccaccaacatggactaacctgcaggcgccggcggagcaggaggaccaaggccctggcgaaggccgtggcctcgatgctgtcatagtaataccagtgtgcaggtcccaatggctggtattaatgtgacagtctcggggacgcgggcctggacgccggcatccgggctcaggacccccctcgagctcgctgatcagcctcgactgtgccttctagttgccagccatctgttgtttgcccctcccccgtgccttccttgaccctggaaggtgccactcccactgtcctttcctaataaaatgaggaaattgcatcgcattgtctgagtaggtgtcattctattctggggggtggggtggggcaggacagcaagggggaggattgggaagacaatagcaggcatgctggggatgcggtgggctctatggaagcttgaattcagctgacgtgcctcggaccgctaggaacccctagtgatggagttggccactccctctctgcgcgctcgctcgctcactgaggccgggcgaccaaaggtcgcccgacgcccgggctttgcccgggcggcctcagtgagcgagcgagcgcgcag

SEQ ID NO: 251 - DNA, 3161 bp, Artificial Sequence
  source: /note="Description of Artificial Sequence: Synthetic polynucleotide"
ctgcgcgctcgctcgctcactgaggccgcccgggcgtcgggcgacctttggtcgcccggcctcagtgagcgagcgagcgcgcagagagggagtggccaactccatcactaggggttcctgcggccgcacgcgtgacattgattattgactagttattaatagtaatcaattacggggtcattagttcatagcccatatatggagttccgcgttacataacttacggtaaatggcccgcctggctgaccgcccaacgacccccgcccattgacgtcaataatgacgtatgttcccatagtaacgccaatagggactttccattgacgtcaatgggtggactatttacggtaaactgcccacttggcagtacatcaagtgtatcatatgccaagtacgccccctattgacgtcaatgacggtaaatggcccgcctggcattatgcccagtacatgaccttatgggactttcctacttggcagtacatctacgtattagtcatcgctattaccatgggtcgaggtgagccccacgttctgcttcactctccccatctcccccccctccccacccccaattttgtatttatttattttttaattattttgtgcagcgatgggggcggggggggggggggcgcgcgccaggcggggcggggcggggcgaggggcggggcggggcgaggcggagaggtgcggcggcagccaatcagagcggcgcgctccgaaagtttccttttatggcgaggcggcggcggcggcggccctataaaaagcgaagcgcgcggcgggcgggagtcgctgcgttgccttcgccccgtgccccgctccgcgccgcctcgcgccgcccgccccggctctgactgaccgcgttactcccacaggtgagcgggcgggacggcccttctcctccgggctgtaattagcgcttggtttaatgacggctcgtttcttttctgtggctgcgtgaaagccttaaagggctccgggagggccctttgtgcgggggggagcggctcggggggtgcgtgcgtgtgtgtgtgcgtggggagcgccgcgtgcggcccgcgctgcccggcggctgtgagcgctgcgggcgcggcgcggggctttgtgcgctccgcgtgtgcgcgaggggagcgcggccgggggcggtgccccgcggtgcgggggggctgcgaggggaacaaaggctgcgtgcggggtgtgtgcgtgggggggtgagcagggggtgtgggcgcggcggtcgggctgtaacccccccctgcacccccctccccgagttgctgagcacggcccggcttcgggtgcggggctccgtgcggggcgtggcgcggggctcgccgtgccgggcggggggtggcggcaggtgggggtgccgggcggggcggggccgcctcgggccggggagggctcgggggaggggcgcggcggcccccggagcgccggcggagcaggaggaccaaggccctggcgaaggccgtggcctcgttgagtcttagagaggcccggtgtgcaggtcccaatggccgggtcttactgagattccacggggacgcgggcctggacgccggcatccgggctcaggacccccctctctagagcctctgctaaccatgttcatgccttcttctttttcctacagctcctgggcaacgtgctggttattgtgaccggtcgctagccaccatggtgagcaagggcgaggagctgttcaccggggtggtgcccatcctggtcgagctggacggcgacgtaaacggccacaagttcagcgtgtccggcgagggcgagggcgatgccacctacggcaagctgaccctgaagttcatctgcaccaccggcaagctgcccgtgccctggcccaccctcgtgaccaccctgacctacggcgtgcagtgcttcagccgctaccccgaccacatgaagcagcacgacttcttcaagtccgccatgcccgaaggctacgtccaggagcgcaccatcttcttcaaggacgacggcaactacaagacccgcgccgaggtgaagttcgagggcgacaccctggtgaaccgcatcgagctgaagggcatcgacttcaaggaggacggcaacatcctggggcacaagctggagtacaactacaacagccacaacgtctatatcatggccgacaagcagaagaacggcatcaaggtgaacttcaagatccgccacaacatcgaggacggcagcgtgcagctcgccgaccactaccagcagaacacccccatcggcgacggccccgtgctgctgcccgacaaccactacctgagcacccagtccgccctgagcaaagaccccaacgagaagcgcgatcacatggtcctgctggagttcgtgaccgccgccgggatcactctcggcatggacgagctgtacaagtaacctgcaggcgccggcggagcaggaggaccaaggccctggcgaaggccgtggcctcgatgctgtcatagtaataccagtgtgcaggtcccaatggctggtattaatgtgacagtctcggggacgcgcaattgggtggcctcgatgctgtcatagtaataccagtgtgcaggtcccaatggctggtattaatgtgacagtctcggggacgcgggcgcgcccgtggcctcgatgctgtcatagtaataccagtgtgcaggtcccaatggctggtattaatgtgacagtctcggggacgcgggcctggacgccggcatccgggctcaggacccccctcgagctcgctgatcagcctcgactgtgccttctagttgccagccatctgttgtttgcccctcccccgtgccttccttgaccctggaaggtgccactcccactgtcctttcctaataaaatgaggaaattgcatcgcattgtctgagtaggtgtcattctattctggggggtggggtggggcaggacagcaagggggaggattgggaagacaatagcaggcatgctggggatgcggtgggctctatggaagcttgaattcagctgacgtgcctcggaccgctaggaacccctagtgatggagttggccactccctctctgcgcgctcgctcgctcactgaggccgggcgaccaaaggtcgcccgacgcccgggctttgcccgggcggcctcagtgagcgagcgagcgcgcagctgcctgcagg

SEQ ID NO: 252 - DNA, 3342 bp, Artificial Sequence
  source: /note="Description of Artificial Sequence: Synthetic polynucleotide"
cctgcaggcagctgcgcgctcgctcgctcactgaggccgcccgggcgtcgggcgacctttggtcgcccggcctcagtgagcgagcgagcgcgcagagagggagtggccaactccatcactaggggttcctgcggccgcacgcgtgacattgattattgactagttattaatagtaatcaattacggggtcattagttcatagcccatatatggagttccgcgttacataacttacggtaaatggcccgcctggctgaccgcccaacgacccccgcccattgacgtcaataatgacgtatgttcccatagtaacgccaatagggactttccattgacgtcaatgggtggactatttacggtaaactgcccacttggcagtacatcaagtgtatcatatgccaagtacgccccctattgacgtcaatgacggtaaatggcccgcctggcattatgcccagtacatgaccttatgggactttcctacttggcagtacatctacgtattagtcatcgctattaccatgggtcgaggtgagccccacgttctgcttcactctccccatctcccccccctccccacccccaattttgtatttatttattttttaattattttgtgcagcgatgggggcggggggggggggggcgcgcgccaggcggggcggggcggggcgaggggcggggcggggcgaggcggagaggtgcggcggcagccaatcagagcggcgcgctccgaaagtttccttttatggcgaggcggcggcggcggcggccctataaaaagcgaagcgcgcggcgggcgggagtcgctgcgttgccttcgccccgtgccccgctccgcgccgcctcgcgccgcccgccccggctctgactgaccgcgttactcccacaggtgagcgggcgggacggcccttctcctccgggctgtaattagcgcttggtttaatgacggctcgtttcttttctgtggctgcgtgaaagccttaaagggctccgggagggccctttgtgcgggggggagcggctcggggggtgcgtgcgtgtgtgtgtgcgtggggagcgccgcgtgcggcccgcgctgcccggcggctgtgagcgctgcgggcgcggcgcggggctttgtgcgctccgcgtgtgcgcgaggggagcgcggccgggggcggtgccccgcggtgcgggggggctgcgaggggaacaaaggctgcgtgcggggtgtgtgcgtgggggggtgagcagggggtgtgggcgcggcggtcgggctgtaacccccccctgcacccccctccccgagttgctgagcacggcccggcttcgggtgcggggctccgtgcggggcgtggcgcggggctcgccgtgccgggcggggggtggcggcaggtgggggtgccgggcggggcggggccgcctcgggccggggagggctcgggggaggggcgcggcggcccccggagcgccggcggagcaggaggaccaaggccctggcgaaggccgtggcctcgttgagtcttagagaggcccggtgtgcaggtcccaatggccgggtcttactgagattccacggggacgcgggatccggtggcctcgttgagtcttagagaggcccggtgtgcaggtcccaatggccgggtcttactgagattccacggggacgcgggtacccgtggcctcgttgagtcttagagaggcccggtgtgcaggtcccaatggccgggtcttactgagattccacggggacgcgggcctggacgccggcatccgggctcaggacccccctctctagagcctctgctaaccatgttcatgccttcttctttttcctacagctcctgggcaacgtgctggttattgtgaccggtcgctagccaccatggtgagcaagggcgaggagctgttcaccggggtggtgcccatcctggtcgagctggacggcgacgtaaacggccacaagttcagcgtgtccggcgagggcgagggcgatgccacctacggcaagctgaccctgaagttcatctgcaccaccggcaagctgcccgtgccctggcccaccctcgtgaccaccctgacctacggcgtgcagtgcttcagccgctaccccgaccacatgaagcagcacgacttcttcaagtccgccatgcccgaaggctacgtccaggagcgcaccatcttcttcaaggacgacggcaactacaagacccgcgccgaggtgaagttcgagggcgacaccctggtgaaccgcatcgagctgaagggcatcgacttcaaggaggacggcaacatcctggggcacaagctggagtacaactacaacagccacaacgtctatatcatggccgacaagcagaagaacggcatcaaggtgaacttcaagatccgccacaacatcgaggacggcagcgtgcagctcgccgaccactaccagcagaacacccccatcggcgacggccccgtgctgctgcccgacaaccactacctgagcacccagtccgccctgagcaaagaccccaacgagaagcgcgatcacatggtcctgctggagttcgtgaccgccgccgggatcactctcggcatggacgagctgtacaagtaacctgcaggcgccggcggagcaggaggaccaaggccctggcgaaggccgtggcctcgatgctgtcatagtaataccagtgtgcaggtcccaatggctggtattaatgtgacagtctcggggacgcgcaattgggtggcctcgatgctgtcatagtaataccagtgtgcaggtcccaatggctggtattaatgtgacagtctcggggacgcgggcgcgcccgtggcctcgatgctgtcatagtaataccagtgtgcaggtcccaatggctggtattaatgtgacagtctcggggacgcgggcctggacgccggcatccgggctcaggacccccctcgagctcgctgatcagcctcgactgtgccttctagttgccagccatctgttgtttgcccctcccccgtgccttccttgaccctggaaggtgccactcccactgtcctttcctaataaaatgaggaaattgcatcgcattgtctgagtaggtgtcattctattctggggggtggggtggggcaggacagcaagggggaggattgggaagacaatagcaggcatgctggggatgcggtgggctctatggaagcttgaattcagctgacgtgcctcggaccgctaggaacccctagtgatggagttggccactccctctctgcgcgctcgctcgctcactgaggccgggcgaccaaaggtcgcccgacgcccgggctttgcccgggcggcctcagtgagcgagcgagcgcgcagctgcctgcagg

SEQ ID NO: 253 - DNA, 4529 bp, Artificial Sequence
  source: /note="Description of Artificial Sequence: Synthetic polynucleotide"
ctgcgcgctcgctcgctcactgaggccgcccgggcgtcgggcgacctttggtcgcccggcctcagtgagcgagcgagcgcgcagagagggagtggccaactccatcactaggggttcctgcggccgcacgcgtgacattgattattgactagttattaatagtaatcaattacggggtcattagttcatagcccatatatggagttccgcgttacataacttacggtaaatggcccgcctggctgaccgcccaacgacccccgcccattgacgtcaataatgacgtatgttcccatagtaacgccaatagggactttccattgacgtcaatgggtggactatttacggtaaactgcccacttggcagtacatcaagtgtatcatatgccaagtacgccccctattgacgtcaatgacggtaaatggcccgcctggcattatgcccagtacatgaccttatgggactttcctacttggcagtacatctacgtattagtcatcgctattaccatgggtcgaggtgagccccacgttctgcttcactctccccatctcccccccctccccacccccaattttgtatttatttattttttaattattttgtgcagcgatgggggcggggggggggggggcgcgcgccaggcggggcggggcggggcgaggggcggggcggggcgaggcggagaggtgcggcggcagccaatcagagcggcgcgctccgaaagtttccttttatggcgaggcggcggcggcggcggccctataaaaagcgaagcgcgcggcgggcgggagtcgctgcgttgccttcgccccgtgccccgctccgcgccgcctcgcgccgcccgccccggctctgactgaccgcgttactcccacaggtgagcgggcgggacggcccttctcctccgggctgtaattagcgcttggtttaatgacggctcgtttcttttctgtggctgcgtgaaagccttaaagggctccgggagggccctttgtgcgggggggagcggctcggggggtgcgtgcgtgtgtgtgtgcgtggggagcgccgcgtgcggcccgcgctgcccggcggctgtgagcgctgcgggcgcggcgcggggctttgtgcgctccgcgtgtgcgcgaggggagcgcggccgggggcggtgccccgcggtgcgggggggctgcgaggggaacaaaggctgcgtgcggggtgtgtgcgtgggggggtgagcagggggtgtgggcgcggcggtcgggctgtaacccccccctgcacccccctccccgagttgctgagcacggcccggcttcgggtgcggggctccgtgcggggcgtggcgcggggctcgccgtgccgggcggggggtggcggcaggtgggggtgccgggcggggcggggccgcctcgggccggggagggctcgggggaggggcgcggcggcccccggagcgccggcggagcaggaggaccaaggccctggcgaaggccgtggcctcgttgagtcttagagaggcccggtgtgcaggtcccaatggccgggtcttactgagattccacggggacgcgggcctggacgccggcatccgggctcaggacccccctctctagagcctctgctaaccatgttcatgccttcttctttttcctacagctcctgggcaacgtgctggttattgtgaccggtcgctagccaccatggctgaagcccctcctagaaggcttggactgggacctcctcctggggatgctcctagagctgaactggtggctctgacagccgtgcagtctgaacaaggcgaagctggtggcggcggatctccacgtagacttggactgctgggaagccctcttcctcctggtgctccacttcctggacctggcagtggatctggatctgcctgtggccagagaagctctgccgctcacaagagataccggcggctgcagaactgggtgtacaacgtgctggaaagacccagaggctgggccttcgtgtaccacgtgttcatctttctgctggtgttcagctgcctggtgctgtccgtgctgagcaccatccaagaacatcaagagctggctaacgagtgcctgttaatactggagtttgtgatgattgtggtgttcggcctcgagtacatcgtccgcgtttggagcgccggctgctgctgcagatatagaggttggcaaggcagattccgcttcgccagaaagcccttctgcgtgatcgacttcatcgtgttcgtggccagcgtggccgtgattgctgctggcacacagggcaacatcttcgccacaagcgccctgcggagcatgcggtttctgcagatcctgagaatggtccgaatggacagaagaggcggcacctggaagctgctgggctctgtggtgtacgcccacagcaaagagctgatcaccgcctggtacatcggatttctggtgctgatcttcgcctccttcctggtgtacctggccgagaaggacgccaacagcgactttagcagctacgccgactctctttggtggggcaccatcacactgaccaccatcggctacggcgacaagacccctcacacatggctgggaagagtgctggccgctggatttgctctgctgggcatcagctttttcgccctgcctgccggaatcctcggatctggctttgccctgaaggtgcaagagcagcatagacaaaagcattttgaaaagagaagaatgcctgccgccaacctgattcaggccgcttggagactgtacagcaccgacatgagcagagcctacctgaccgccacgtggtattattacgattcgatcctgcctagcttccgcgaactggccctgctgtttgagcatgtgcagagagccagaaacggcggcctcagacctctggaagttcggagagcacctgtgcctgatggcgccccttctagatatcctccagtggccacctgtcacagacccggcagcacatctttttgccctggcgagtctagccggatgggcatcaaggacagaatcagaatgggcagcagccagcggagaacaggcccttctaaacagcatctggcccctccaaccatgcctacaagccctagctctgagcaagtgggcgaagccacctctcctaccaaggtgcagaagtcctggtccttcaacgaccggaccagatttagagccagcctccggctgaagcccagaacctctgccgaggatgccccttctgaagaggtggccgaagagaagtcctaccagtgcgagctgaccgtggacgacatcatgccagccgtgaaaaccgtgataaggtctatacgcatcctgaagttcctggtggccaagcggaagttcaaagagacactgcggccctacgacgtgaaggacgtgatcgagcagtattctgccggccacctggacatgctgggcagaatcaagagcctgcagaccagagtggaccagatcgttggaagaggcccaggcgacagaaaggccagagagaagggcgataagggcccatctgatgccgaggttgtcgacgagatatcaatgatgggcagagtcgtgaaagtcgaaaaacaggtgcagagcatcgagcacaagctggacctgctgctgggattctacagccggtgtctgagaagcggcacatctgcatctctgggcgctgtgcaggtcccactgttcgatcctgatattacgagcgattatcacagccccgtggaccacgaggacatctccgtttctgctcagaccctgagcatcagcagatccgtgtccaccaacatggactaacctgcaggcgccggcggagcaggaggaccaaggccctggcgaaggccgtggcctcgatgctgtcatagtaataccagtgtgcaggtcccaatggctggtattaatgtgacagtctcggggacgcgcaattgggtggcctcgatgctgtcatagtaataccagtgtgcaggtcccaatggctggtattaatgtgacagtctcggggacgcgggcgcgcccgtggcctcgatgctgtcatagtaataccagtgtgcaggtcccaatggctggtattaatgtgacagtctcggggacgcgggcctggacgccggcatccgggctcaggacccccctcgagctcgctgatcagcctcgactgtgccttctagttgccagccatctgttgtttgcccctcccccgtgccttccttgaccctggaaggtgccactcccactgtcctttcctaataaaatgaggaaattgcatcgcattgtctgagtaggtgtcattctattctggggggtggggtggggcaggacagcaagggggaggattgggaagacaatagcaggcatgctggggatgcggtgggctctatggaagcttgaattcagctgacgtgcctcggaccgctaggaacccctagtgatggagttggccactccctctctgcgcgctcgctcgctcactgaggccgggcgaccaaaggtcgcccgacgcccgggctttgcccgggcggcctcagtgagcgagcgagcgcgcagctgcctgcagg

SEQ ID NO: 254 - DNA, 4710 bp, Artificial Sequence
  source: /note="Description of Artificial Sequence: Synthetic polynucleotide"
cctgcaggcagctgcgcgctcgctcgctcactgaggccgcccgggcgtcgggcgacctttggtcgcccggcctcagtgagcgagcgagcgcgcagagagggagtggccaactccatcactaggggttcctgcggccgcacgcgtgacattgattattgactagttattaatagtaatcaattacggggtcattagttcatagcccatatatggagttccgcgttacataacttacggtaaatggcccgcctggctgaccgcccaacgacccccgcccattgacgtcaataatgacgtatgttcccatagtaacgccaatagggactttccattgacgtcaatgggtggactatttacggtaaactgcccacttggcagtacatcaagtgtatcatatgccaagtacgccccctattgacgtcaatgacggtaaatggcccgcctggcattatgcccagtacatgaccttatgggactttcctacttggcagtacatctacgtattagtcatcgctattaccatgggtcgaggtgagccccacgttctgcttcactctccccatctcccccccctccccacccccaattttgtatttatttattttttaattattttgtgcagcgatgggggcggggggggggggggcgcgcgccaggcggggcggggcggggcgaggggcggggcggggcgaggcggagaggtgcggcggcagccaatcagagcggcgcgctccgaaagtttccttttatggcgaggcggcggcggcggcggccctataaaaagcgaagcgcgcggcgggcgggagtcgctgcgttgccttcgccccgtgccccgctccgcgccgcctcgcgccgcccgccccggctctgactgaccgcgttactcccacaggtgagcgggcgggacggcccttctcctccgggctgtaattagcgcttggtttaatgacggctcgtttcttttctgtggctgcgtgaaagccttaaagggctccgggagggccctttgtgcgggggggagcggctcggggggtgcgtgcgtgtgtgtgtgcgtggggagcgccgcgtgcggcccgcgctgcccggcggctgtgagcgctgcgggcgcggcgcggggctttgtgcgctccgcgtgtgcgcgaggggagcgcggccgggggcggtgccccgcggtgcgggggggctgcgaggggaacaaaggctgcgtgcggggtgtgtgcgtgggggggtgagcagggggtgtgggcgcggcggtcgggctgtaacccccccctgcacccccctccccgagttgctgagcacggcccggcttcgggtgcggggctccgtgcggggcgtggcgcggggctcgccgtgccgggcggggggtggcggcaggtgggggtgccgggcggggcggggccgcctcgggccggggagggctcgggggaggggcgcggcggcccccggagcgccggcggagcaggaggaccaaggccctggcgaaggccgtggcctcgttgagtcttagagaggcccggtgtgcaggtcccaatggccgggtcttactgagattccacggggacgcgggatccggtggcctcgttgagtcttagagaggcccggtgtgcaggtcccaatggccgggtcttactgagattccacggggacgcgggtacccgtggcctcgttgagtcttagagaggcccggtgtgcaggtcccaatggccgggtcttactgagattccacggggacgcgggcctggacgccggcatccgggctcaggacccccctctctagagcctctgctaaccatgttcatgccttcttctttttcctacagctcctgggcaacgtgctggttattgtgaccggtcgctagccaccatggctgaagcccctcctagaaggcttggactgggacctcctcctggggatgctcctagagctgaactggtggctctgacagccgtgcagtctgaacaaggcgaagctggtggcggcggatctccacgtagacttggactgctgggaagccctcttcctcctggtgctccacttcctggacctggcagtggatctggatctgcctgtggccagagaagctctgccgctcacaagagataccggcggctgcagaactgggtgtacaacgtgctggaaagacccagaggctgggccttcgtgtaccacgtgttcatctttctgctggtgttcagctgcctggtgctgtccgtgctgagcaccatccaagaacatcaagagctggctaacgagtgcctgttaatactggagtttgtgatgattgtggtgttcggcctcgagtacatcgtccgcgtttggagcgccggctgctgctgcagatatagaggttggcaaggcagattccgcttcgccagaaagcccttctgcgtgatcgacttcatcgtgttcgtggccagcgtggccgtgattgctgctggcacacagggcaacatcttcgccacaagcgccctgcggagcatgcggtttctgcagatcctgagaatggtccgaatggacagaagaggcggcacctggaagctgctgggctctgtggtgtacgcccacagcaaagagctgatcaccgcctggtacatcggatttctggtgctgatcttcgcctccttcctggtgtacctggccgagaaggacgccaacagcgactttagcagctacgccgactctctttggtggggcaccatcacactgaccaccatcggctacggcgacaagacccctcacacatggctgggaagagtgctggccgctggatttgctctgctgggcatcagctttttcgccctgcctgccggaatcctcggatctggctttgccctgaaggtgcaagagcagcatagacaaaagcattttgaaaagagaagaatgcctgccgccaacctgattcaggccgcttggagactgtacagcaccgacatgagcagagcctacctgaccgccacgtggtattattacgattcgatcctgcctagcttccgcgaactggccctgctgtttgagcatgtgcagagagccagaaacggcggcctcagacctctggaagttcggagagcacctgtgcctgatggcgccccttctagatatcctccagtggccacctgtcacagacccggcagcacatctttttgccctggcgagtctagccggatgggcatcaaggacagaatcagaatgggcagcagccagcggagaacaggcccttctaaacagcatctggcccctccaaccatgcctacaagccctagctctgagcaagtgggcgaagccacctctcctaccaaggtgcagaagtcctggtccttcaacgaccggaccagatttagagccagcctccggctgaagcccagaacctctgccgaggatgccccttctgaagaggtggccgaagagaagtcctaccagtgcgagctgaccgtggacgacatcatgccagccgtgaaaaccgtgataaggtctatacgcatcctgaagttcctggtggccaagcggaagttcaaagagacactgcggccctacgacgtgaaggacgtgatcgagcagtattctgccggccacctggacatgctgggcagaatcaagagcctgcagaccagagtggaccagatcgttggaagaggcccaggcgacagaaaggccagagagaagggcgataagggcccatctgatgccgaggttgtcgacgagatatcaatgatgggcagagtcgtgaaagtcgaaaaacaggtgcagagcatcgagcacaagctggacctgctgctgggattctacagccggtgtctgagaagcggcacatctgcatctctgggcgctgtgcaggtcccactgttcgatcctgatattacgagcgattatcacagccccgtggaccacgaggacatctccgtttctgctcagaccctgagcatcagcagatccgtgtccaccaacatggactaacctgcaggcgccggcggagcaggaggaccaaggccctggcgaaggccgtggcctcgatgctgtcatagtaataccagtgtgcaggtcccaatggctggtattaatgtgacagtctcggggacgcgcaattgggtggcctcgatgctgtcatagtaataccagtgtgcaggtcccaatggctggtattaatgtgacagtctcggggacgcgggcgcgcccgtggcctcgatgctgtcatagtaataccagtgtgcaggtcccaatggctggtattaatgtgacagtctcggggacgcgggcctggacgccggcatccgggctcaggacccccctcgagctcgctgatcagcctcgactgtgccttctagttgccagccatctgttgtttgcccctcccccgtgccttccttgaccctggaaggtgccactcccactgtcctttcctaataaaatgaggaaattgcatcgcattgtctgagtaggtgtcattctattctggggggtggggtggggcaggacagcaagggggaggattgggaagacaatagcaggcatgctggggatgcggtgggctctatggaagcttgaattcagctgacgtgcctcggaccgctaggaacccctagtgatggagttggccactccctctctgcgcgctcgctcgctcactgaggccgggcgaccaaaggtcgcccgacgcccgggctttgcccgggcggcctcagtgagcgagcgagcgcgcagctgcctgcagg

SEQ ID NO: 255 - DNA, 6417 bp, Artificial Sequence
  source: /note="Description of Artificial Sequence: Synthetic polynucleotide"
cctgcaggcagctgcgcgctcgctcgctcactgaggccgcccgggcgtcgggcgacctttggtcgcccggcctcagtgagcgagcgagcgcgcagagagggagtggccaactccatcactaggggttcctgcggccgcacgcgtctagatcccatatatggagttccgcgttacataacttacggtaaatggcccgcctggctgaccgcccaacgacccccgcccattgacgtcaataatgacgtatgttcccatagtaacgccaatagggactttccattgacgtcaatgggtggagtatttacggtaaactgcccacttggcagtacatcaagtgtatcatatgccaagtacgccccctattgacgtcaatgacggtaaatggcccgcctggcattatgcccagtacatgaccttatgggactttcctacttggcagtacatctacgtattagtcatcgctattaccatggtgatgcggttttggcagtacatcaatgggcgtggatagcggtttgactcacggggatttccaagtctccaccccattgacgtcaatgggagtttgttttggcaccaaaatcaacgggactttccaaaatgtcgtaacaactccgccccattgacgcaaatgggcggtaggcgtgtacggtgggaggtctatataagcagagctcgtttagtgaaccgtcagatcgcctggagacgcaccggtgccaccatggctgaagcccctcctagaaggcttggactgggacctcctcctggggatgctcctagagctgaactggtggctctgacagccgtgcagtctgaacaaggcgaagctggtggcggcggatctccacgtagacttggactgctgggaagccctcttcctcctggtgctccacttcctggacctggcagtggatctggatctgcctgtggccagagaagctctgccgctcacaagagataccggcggctgcagaactgggtgtacaacgtgctggaaagacccagaggctgggccttcgtgtaccacgtgttcatctttctgctggtgttcagctgcctggtgctgtccgtgctgagcaccatccaagaacatcaagagctggctaacgagtgcctgttaatactggagtttgtgatgattgtggtgttcggcctcgagtacatcgtccgcgtttggagcgccggctgctgctgcagatatagaggttggcaaggcagattccgcttcgccagaaagcccttctgcgtgatcgacttcatcgtgttcgtggccagcgtggccgtgattgctgctggcacacagggcaacatcttcgccacaagcgccctgcggagcatgcggtttctgcagatcctgagaatggtccgaatggacagaagaggcggcacctggaagctgctgggctctgtggtgtacgcccacagcaaagagctgatcaccgcctggtacatcggatttctggtgctgatcttcgcctccttcctggtgtacctggccgagaaggacgccaacagcgactttagcagctacgccgactctctttggtggggcaccatcacactgaccaccatcggctacggcgacaagacccctcacacatggctgggaagagtgctggccgctggatttgctctgctgggcatcagctttttcgccctgcctgccggaatcctcggatctggctttgccctgaaggtgcaagagcagcatagacaaaagcattttgaaaagagaagaatgcctgccgccaacctgattcaggccgcttggagactgtacagcaccgacatgagcagagcctacctgaccgccacgtggtattattacgattcgatcctgcctagcttccgcgaactggccctgctgtttgagcatgtgcagagagccagaaacggcggcctcagacctctggaagttcggagagcacctgtgcctgatggcgccccttctagatatcctccagtggccacctgtcacagacccggcagcacatctttttgccctggcgagtctagccggatgggcatcaaggacagaatcagaatgggcagcagccagcggagaacaggcccttctaaacagcatctggcccctccaaccatgcctacaagccctagctctgagcaagtgggcgaagccacctctcctaccaaggtgcagaagtcctggtccttcaacgaccggaccagatttagagccagcctccggctgaagcccagaacctctgccgaggatgccccttctgaagaggtggccgaagagaagtcctaccagtgcgagctgaccgtggacgacatcatgccagccgtgaaaaccgtgataaggtctatacgcatcctgaagttcctggtggccaagcggaagttcaaagagacactgcggccctacgacgtgaaggacgtgatcgagcagtattctgccggccacctggacatgctgggcagaatcaagagcctgcagaccagagtggaccagatcgttggaagaggcccaggcgacagaaaggccagagagaagggcgataagggcccatctgatgccgaggttgtcgacgagatatcaatgatgggcagagtcgtgaaagtcgaaaaacaggtgcagagcatcgagcacaagctggacctgctgctgggattctacagccggtgtctgagaagcggcacatctgcatctctgggcgctgtgcaggtcccactgttcgatcctgatattacgagcgattatcacagccccgtggaccacgaggacatctccgtttctgctcagaccctgagcatcagcagatccgtgtccaccaacatggacggatcccgggctgactacaaagaccatgacggtgattataaagatcatgacatcgactacaaggatgacgatgacaagggctccggagagggcagaggaagtctgctaacatgcggtgacgtcgaggagaatcctggcccaatggtgagcaagggcgaggcagtgatcaaggagttcatgcggttcaaggtgcacatggagggctccatgaacggccacgagttcgagatcgagggcgagggcgagggccgcccctacgagggcacccagaccgccaagctgaaggtgaccaagggtggccccctgcccttctcctgggacatcctgtcccctcagttcatgtacggctccagggccttcatcaagcaccccgccgacatccccgactactataagcagtccttccccgagggcttcaagtgggagcgcgtgatgaacttcgaggacggcggcgccgtgaccgtgacccaggacacctccctggaggacggcaccctgatctacaaggtgaagctccgcggcaccaacttccctcctgacggccccgtaatgcagaagaagacaatgggctgggaagcgtccaccgagcggttgtaccccgaggacggcgtgctgaagggcgacattaagatggccctgcgcctgaaggacggcggccgctacctggcggacttcaagaccacctacaaggccaagaagcccgtgcagatgcccggcgcctacaacgtcgaccgcaagttggacatcacctcccacaacgaggactacaccgtggtggaacagtacgaacgctccgagggccgccactccaccggcggcatggacgagctgtacaagtaataagagctcgctgatcagcctcgactgtgccttctagttgccagccatctgttgtttgcccctcccccgtgccttccttgaccctggaaggtgccactcccactgtcctttcctaataaaatgaggaaattgcatcgcattgtctgagtaggtgtcattctattctggggggtggggtggggcaggacagcaagggggaggattgggaagacaatagcaggcatgctggggatgcggtgggctctatggaagcttgaattcagctgacgtgcctcggaccgctaggaacccctagtgatggagttggccactccctctctgcgcgctcgctcgctcactgaggccgggcgaccaaaggtcgcccgacgcccgggctttgcccgggcggcctcagtgagcgagcgagcgcgcagctgcctgcaggggcgcctgatgcggtattttctccttacgcatctgtgcggtatttcacaccgcatacgtcaaagcaaccatagtacgcgccctgtagcggcgcattaagcgcggcgggtgtggtggttacgcgcagcgtgaccgctacacttgccagcgccctagcgcccgctcctttcgctttcttcccttcctttctcgccacgttcgccggctttccccgtcaagctctaaatcgggggctccctttagggttccgatttagtgctttacggcacctcgaccccaaaaaacttgatttgggtgatggttcacgtagtgggccatcgccctgatagacggtttttcgccctttgacgttggagtccacgttctttaatagtggactcttgttccaaactggaacaacactcaaccctatctcgggctattcttttgatttataagggattttgccgatttcggcctattggttaaaaaatgagctgatttaacaaaaatttaacgcgaattttaacaaaatattaacgtttacaattttatggtgcactctcagtacaatctgctctgatgccgcatagttaagccagccccgacacccgccaacacccgctgacgcgccctgacgggcttgtctgctcccggcatccgcttacagacaagctgtgaccgtctccgggagctgcatgtgtcagaggttttcaccgtcatcaccgaaacgcgcgagacgaaagggcctcgtgatacgcctatttttataggttaatgtcatgaacaataaaactgtctgcttacataaacagtaatacaaggggtgttatgagccatattcaacgggaaacgtcgaggccgcgattaaattccaacatggatgctgatttatatgggtataaatgggctcgcgataatgtcgggcaatcaggtgcgacaatctatcgcttgtatgggaagcccgatgcgccagagttgtttctgaaacatggcaaaggtagcgttgccaatgatgttacagatgagatggtcagactaaactggctgacggaatttatgcctcttccgaccatcaagcattttatccgtactcctgatgatgcatggttactcaccactgcgatccccggaaaaacagcattccaggtattagaagaatatcctgattcaggtgaaaatattgttgatgcgctggcagtgttcctgcgccggttgcattcgattcctgtttgtaattgtccttttaacagcgatcgcgtatttcgtctcgctcaggcgcaatcacgaatgaataacggtttggttgatgcgagtgattttgatgacgagcgtaatggctggcctgttgaacaagtctggaaagaaatgcataaacttttgccattctcaccggattcagtcgtcactcatggtgatttctcacttgataaccttatttttgacgaggggaaattaataggttgtattgatgttggacgagtcggaatcgcagaccgataccaggatcttgccatcctatggaactgcctcggtgagttttctccttcattacagaaacggctttttcaaaaatatggtattgataatcctgatatgaataaattgcagtttcatttgatgctcgatgagtttttctaatctcatgaccaaaatcccttaacgtgagttttcgttccactgagcgtcagaccccgtagaaaagatcaaaggatcttcttgagatcctttttttctgcgcgtaatctgctgcttgcaaacaaaaaaaccaccgctaccagcggtggtttgtttgccggatcaagagctaccaactctttttccgaaggtaactggcttcagcagagcgcagataccaaatactgtccttctagtgtagccgtagttaggccaccacttcaagaactctgtagcaccgcctacatacctcgctctgctaatcctgttaccagtggctgctgccagtggcgataagtcgtgtcttaccgggttggactcaagacgatagttaccggataaggcgcagcggtcgggctgaacggggggttcgtgcacacagcccagcttggagcgaacgacctacaccgaactgagatacctacagcgtgagctatgagaaagcgccacgcttcccgaagggagaaaggcggacaggtatccggtaagcggcagggtcggaacaggagagcgcacgagggagcttccagggggaaacgcctggtatctttatagtcctgtcgggtttcgccacctctgacttgagcgtcgatttttgtgatgctcgtcaggggggcggagcctatggaaaaacgccagcaacgcggcctttttacggttcctggccttttgctggccttttgctcacatgt

SEQ ID NO: 256 - DNA, 4070 bp, Artificial Sequence
  source: /note="Description of Artificial Sequence: Synthetic polynucleotide"
cctgcaggcagctgcgcgctcgctcgctcactgaggccgcccgggcgtcgggcgacctttggtcgcccggcctcagtgagcgagcgagcgcgcagagagggagtggccaactccatcactaggggttcctgcggccgcacgcgtctagatcccatatatggagttccgcgttacataacttacggtaaatggcccgcctggctgaccgcccaacgacccccgcccattgacgtcaataatgacgtatgttcccatagtaacgccaatagggactttccattgacgtcaatgggtggagtatttacggtaaactgcccacttggcagtacatcaagtgtatcatatgccaagtacgccccctattgacgtcaatgacggtaaatggcccgcctggcattatgcccagtacatgaccttatgggactttcctacttggcagtacatctacgtattagtcatcgctattaccatggtgatgcggttttggcagtacatcaatgggcgtggatagcggtttgactcacggggatttccaagtctccaccccattgacgtcaatgggagtttgttttggcaccaaaatcaacgggactttccaaaatgtcgtaacaactccgccccattgacgcaaatgggcggtaggcgtgtacggtgggaggtctatataagcagagctcgtttagtgaaccgtcagatcgcctggagacgcaccggtgccaccatggccgaggcccccccgcgccgcctcggcctgggtcccccgcccggggacgccccccgcgcggagctagtggcgctcacggccgtgcagagcgaacagggcgaggcgggcgggggcggctccccgcgccgcctcggcctcctgggcagccccctgccgccgggcgcgcccctccctgggccgggctccggctcgggctccgcctgcggccagcgctcctcggccgcgcacaagcgctaccgccgcctgcagaactgggtctacaacgtgctggagcggccccgcggctgggccttcgtctaccacgtcttcatatttttgctggtcttcagctgcctggtgctgtctgtgctgtccactatccaggagcaccaggaacttgccaacgagtgtctcctcatcttggaattcgtgatgatcgtggttttcggcttggagtacatcgtccgggtctggtccgccggatgctgctgccgctaccgaggatggcagggtcgcttccgctttgccagaaagcccttctgtgtcatcgacttcatcgtgttcgtggcctcggtggccgtcatcgccgcgggtacccagggcaacatcttcgccacgtccgcgctgcgcagcatgcgcttcctgcagatcctgcgcatggtgcgcatggaccgccgcggcggcacctggaagctgctgggctcagtggtctacgcgcatagcaaggagctgatcaccgcctggtacatcgggttcctggtgctcatcttcgcctccttcctggtctacctggctgagaaggacgccaactccgacttctcctcctacgccgactcgctctggtgggggacgattacattgacaaccatcggctatggtgacaagacaccgcacacatggctgggcagggtcctggctgctggcttcgccttactgggcatctctttctttgccctgcctgccggcatcctaggctccggctttgccctgaaggtccaggagcagcaccggcagaagcacttcgagaagcggaggatgccggcagccaacctcatccaggctgcctggcgcctgtactccaccgatatgagccgggcctacctgacagccacctggtactactatgacagtatcctcccatccttcagagagctggccctcttgtttgagcacgtgcaacgggcccgcaatgggggcctacggcccctggaggtgcggcgggcgccggtacccgacggagcaccctcccgttacccgcccgttgccacctgccaccggccgggcagcacctccttctgccctggggaaagcagccggatgggcatcaaagaccgcatccgcatgggcagctcccagcggcggacgggtccttccaagcagcatctggcacctccaacaatgcccacctccccaagcagcgagcaggtgggtgaggccaccagccccaccaaggtgcaaaagagctggagcttcaatgaccgcacccgcttccgggcatctctgagactcaaaccccgcacctctgctgaggatgccccctcagaggaagtagcagaggagaagagctaccagtgtgagctcacggtggacgacatcatgcctgctgtgaagacagtcatccgctccatcaggattctcaagttcctggtggccaaaaggaaattcaaggagacactgcgaccgtacgacgtgaaggacgtcattgagcagtactcagcaggccacctggacatgctgggccggatcaagagcctgcaaactcgggtggaccaaattgtgggtcgggggcccggggacaggaaggcccgggagaagggcgacaaggggccctccgacgcggaggtggtggatgaaatcagcatgatgggacgcgtggtcaaggtggagaagcaggtgcagtccatcgagcacaagctggacctgctgttgggcttctattcgcgctgcctgcgctctggcacctcggccagcctgggcgccgtgcaagtgccgctgttcgaccccgacatcacctccgactaccacagccctgtggaccacgaggacatctccgtctccgcacagacgctcagcatctcccgctcggtcagcaccaacatggacggatcccgggctgactacaaagaccatgacggtgattataaagatcatgacatcgactacaaggatgacgatgacaagggctccggagagggcagaggaagtctgctaacatgcggtgacgtcgaggagaatcctggcccaatggtgagcaagggcgaggcagtgatcaaggagttcatgcggttcaaggtgcacatggagggctccatgaacggccacgagttcgagatcgagggcgagggcgagggccgcccctacgagggcacccagaccgccaagctgaaggtgaccaagggtggccccctgcccttctcctgggacatcctgtcccctcagttcatgtacggctccagggccttcatcaagcaccccgccgacatccccgactactataagcagtccttccccgagggcttcaagtgggagcgcgtgatgaacttcgaggacggcggcgccgtgaccgtgacccaggacacctccctggaggacggcaccctgatctacaaggtgaagctccgcggcaccaacttccctcctgacggccccgtaatgcagaagaagacaatgggctgggaagcgtccaccgagcggttgtaccccgaggacggcgtgctgaagggcgacattaagatggccctgcgcctgaaggacggcggccgctacctggcggacttcaagaccacctacaaggccaagaagcccgtgcagatgcccggcgcctacaacgtcgaccgcaagttggacatcacctcccacaacgaggactacaccgtggtggaacagtacgaacgctccgagggccgccactccaccggcggcatggacgagctgtacaagtaataagagctcgctgatcagcctcgactgtgccttctagttgccagccatctgttgtttgcccctcccccgtgccttccttgaccctggaaggtgccactcccactgtcctttcctaataaaatgaggaaattgcatcgcattgtctgagtaggtgtcattctattctggggggtggggtggggcaggacagcaagggggaggattgggaagacaatagcaggcatgctggggatgcggtgggctctatggaagcttgaattcagctgacgtgcctcggaccgctaggaacccctagtgatggagttggccactccctctctgcgcgctcgctcgctcactgaggccgggcgaccaaaggtcgcccgacgcccgggctttgcccgggcggcctcagtgagcgagcgagcgcgcagctgcctgcagg

SEQ ID NO: 257 - DNA, 4073 bp, Artificial Sequence
  source: /note="Description of Artificial Sequence: Synthetic polynucleotide"
cctgcaggcagctgcgcgctcgctcgctcactgaggccgcccgggcgtcgggcgacctttggtcgcccggcctcagtgagcgagcgagcgcgcagagagggagtggccaactccatcactaggggttcctgcggccgcacgcgtctagatcccatatatggagttccgcgttacataacttacggtaaatggcccgcctggctgaccgcccaacgacccccgcccattgacgtcaataatgacgtatgttcccatagtaacgccaatagggactttccattgacgtcaatgggtggagtatttacggtaaactgcccacttggcagtacatcaagtgtatcatatgccaagtacgccccctattgacgtcaatgacggtaaatggcccgcctggcattatgcccagtacatgaccttatgggactttcctacttggcagtacatctacgtattagtcatcgctattaccatggtgatgcggttttggcagtacatcaatgggcgtggatagcggtttgactcacggggatttccaagtctccaccccattgacgtcaatgggagtttgttttggcaccaaaatcaacgggactttccaaaatgtcgtaacaactccgccccattgacgcaaatgggcggtaggcgtgtacggtgggaggtctatataagcagagctcgtttagtgaaccgtcagatcgcctggagacgcaccggtgccaccatggccgaggcccccccgcgccgcctcggcctgggccccccgcccggggacgccccccgcgcggagttggtggcgctcacggccgtgcagagtgaacagggcgaggcgggcgggggcggctctccgcgtcgcctcggccttctgggcagccccctgccgccgggcgcgcccctccctgggccgggctccggctcgggctccgcctgcggcggccagcgctcctccgccgcgcagaagcgctaccgccgcctgcagaactgggtctacaacgtgctggagcggccccgcgggtgggccttcgtctaccacgtcttcatatttttgctagtcttcagctgcctggtgctgtctgtactgtccaccatccaggagcaccaggaacttgccaacgagtgtctccttatcttggaattcgtgatgattgtggtctttggcttggagtatataatccgtgtctggtcggccggatgctgttgtcgctacagaggatggcagggacgctttcgcttcgccaggaaacccttctgtgtcatcgacttcatcgtgttcgtggcctcggtggcagtgatagctgcgggcacacaaggcaacatctttgctacgtccgcgttgcgcagtatgcgcttcctacagatcctgcgcatggtgcgtatggatcgccgcggtggcacctggaagctgttgggatccgtggtctatgcgcacagtaaggagctgatcaccgcctggtacatcgggttcctggtgctcatctttgcctctttcctggtctacctggctgagaaggatgccaactctgacttctcctcctatgccgactcgctctggtgggggacgatcacactgacgaccattggctatggtgacaagacgccacatacatggctgggcagggttctggctgccggcttcgccttactgggcatctccttctttgccctgcctgccggcatcctgggctctggctttgccctgaaggtccaggagcagcacaggcagaagcactttgagaagcgcaggatgccagcagctaatctcatccaggctgcgtggcgcctgtactccacggacacaagccgggcctatttgacagccacctggtattactatgacagcattctcccatctttcagagagctggccctcttgtttgagcacatacaacgggcccgcaatgggggcttacggcccctggaggtgaggcgggcgccagtacctgatggagcgccctctcgctacccgcccgttgccacctgccaccggccaggcagtgcctccttctgccctggggaaagcagccggatgggcatcaaagaccgaatccgcataagcagctcccagaagcggacaggcccctccaagcagcatctggcccctccgccgattcccacctcgccaagcagtgagcaggtgggcgaggcatccagccccagcaaggtgcagaaaagctggagcttcaatgaccgcacccgcttccgggcctctctaagactcaagcctcgctgctctgctgaggagggcccctcagaggaagtggccgaggagaagagctaccagtgtgagcttacggtggatgatgtcatgcctgctgtgaagacggtcatccgttctgtcaggattctgaagttcctggtagccaaaaggaaattcaaggagacgctgcggccatatgatgtgaaggatgtcattgagcagtattcagcaggacacctggacatgctgggacgaatcaagagcctgcaagcccgggtggaccaaattgtgggtcggggccctggggaccgcaagactcgggagaagggcgataagggtccttcagacacggaggcagtggatgaaatcagcatgatggggcgcgtagtcaaggtggaaaagcaggtgcagtccatcgaacataagttggatctgctgctgggcttctactcgcgctgcctccgctctggcacctcggccagcctgggcactgtgcaagtgccgctcttcgaccccgacatcacctcggactaccacagccctgtagaccacgaggacatctctgtctccgcacagacgctcagcatctctcgctcagtcagcaccaacatggacggatcccgggctgactacaaagaccatgacggtgattataaagatcatgacatcgactacaaggatgacgatgacaagggctccggagagggcagaggaagtctgctaacatgcggtgacgtcgaggagaatcctggcccaatggtgagcaagggcgaggcagtgatcaaggagttcatgcggttcaaggtgcacatggagggctccatgaacggccacgagttcgagatcgagggcgagggcgagggccgcccctacgagggcacccagaccgccaagctgaaggtgaccaagggtggccccctgcccttctcctgggacatcctgtcccctcagttcatgtacggctccagggccttcatcaagcaccccgccgacatccccgactactataagcagtccttccccgagggcttcaagtgggagcgcgtgatgaacttcgaggacggcggcgccgtgaccgtgacccaggacacctccctggaggacggcaccctgatctacaaggtgaagctccgcggcaccaacttccctcctgacggccccgtaatgcagaagaagacaatgggctgggaagcgtccaccgagcggttgtaccccgaggacggcgtgctgaagggcgacattaagatggccctgcgcctgaaggacggcggccgctacctggcggacttcaagaccacctacaaggccaagaagcccgtgcagatgcccggcgcctacaacgtcgaccgcaagttggacatcacctcccacaacgaggactacaccgtggtggaacagtacgaacgctccgagggccgccactccaccggcggcatggacgagctgtacaagtaataagagctcgctgatcagcctcgactgtgccttctagttgccagccatctgttgtttgcccctcccccgtgccttccttgaccctggaaggtgccactcccactgtcctttcctaataaaatgaggaaattgcatcgcattgtctgagtaggtgtcattctattctggggggtggggtggggcaggacagcaagggggaggattgggaagacaatagcaggcatgctggggatgcggtgggctctatggaagcttgaattcagctgacgtgcctcggaccgctaggaacccctagtgatggagttggccactccctctctgcgcgctcgctcgctcactgaggccgggcgaccaaaggtcgcccgacgcccgggctttgcccgggcggcctcagtgagcgagcgagcgcgcagctgcctgcagg

SEQ ID NO: 258 - DNA, 3715 bp, Artificial Sequence
  source: /note="Description of Artificial Sequence: Synthetic polynucleotide"
  modified_base (3537)..(3541): a, c, t, g, unknown or other
ctgcgcgctcgctcgctcactgaggccgcccgggcgtcgggcgacctttggtcgcccggcctcagtgagcgagcgagcgcgcagagagggagtggccaactccatcactaggggttcctgcggccgcacgcgtctagatcccatatatggagttccgcgttacataacttacggtaaatggcccgcctggctgaccgcccaacgacccccgcccattgacgtcaataatgacgtatgttcccatagtaacgccaatagggactttccattgacgtcaatgggtggagtatttacggtaaactgcccacttggcagtacatcaagtgtatcatatgccaagtacgccccctattgacgtcaatgacggtaaatggcccgcctggcattatgcccagtacatgaccttatgggactttcctacttggcagtacatctacgtattagtcatcgctattaccatggtgatgcggttttggcagtacatcaatgggcgtggatagcggtttgactcacggggatttccaagtctccaccccattgacgtcaatgggagtttgttttggcaccaaaatcaacgggactttccaaaatgtcgtaacaactccgccccattgacgcaaatgggcggtaggcgtgtacggtgggaggtctatataagcagagctcgtttagtgaaccgtcagatcgcctggagacgcaccggtgccaccatggaagatgccaaaaacattaagaagggcccagcgccattctacccactcgaagacgggaccgccggcgagcagctgcacaaagccatgaagcgctacgccctggtgcccggcaccatcgcctttaccgacgcacatatcgaggtggacattacctacgccgagtacttcgagatgagcgttcggctggcagaagctatgaagcgctatgggctgaatacaaaccatcggatcgtggtgtgcagcgagaatagcttgcagttcttcatgcccgtgttgggtgccctgttcatcggtgtggctgtggccccagctaacgacatctacaacgagcgcgagctgctgaacagcatgggcatcagccagcccaccgtcgtattcgtgagcaagaaagggctgcaaaagatcctcaacgtgcaaaagaagctaccgatcatacaaaagatcatcatcatggatagcaagaccgactaccagggcttccaaagcatgtacaccttcgtgacttcccatttgccacccggcttcaacgagtacgacttcgtgcccgagagcttcgaccgggacaaaaccatcgccctgatcatgaacagtagtggcagtaccggattgcccaagggcgtagccctaccgcaccgcaccgcttgtgtccgattcagtcatgcccgcgaccccatcttcggcaaccagatcatccccgacaccgctatcctcagcgtggtgccatttcaccacggcttcggcatgttcaccacgctgggctacttgatctgcggctttcgggtcgtgctcatgtaccgcttcgaggaggagctattcttgcgcagcttgcaagactataagattcaatctgccctgctggtgcccacactatttagcttcttcgctaagagcactctcatcgacaagtacgacctaagcaacttgcacgagatcgccagcggcggggcgccgctcagcaaggaggtaggtgaggccgtggccaaacgcttccacctaccaggcatccgccagggctacggcctgacagaaacaaccagcgccattctgatcacccccgaaggggacgacaagcctggcgcagtaggcaaggtggtgcccttcttcgaggctaaggtggtggacttggacacaggtaagacactgggtgtgaaccagcgcggcgagctgtgcgtccgtggccccatgatcatgagcggctacgttaacaaccccgaggctacaaacgctctcatcgacaaggacggctggctgcacagcggcgacatcgcctactgggacgaggacgagcacttcttcatcgtggaccggctgaagagcctgatcaaatacaagggctaccaggtagccccagccgaactggagagcatcctgctgcaacaccccaacatcttcgacgccggggtcgccggcctgcccgacgacgatgccggcgagctgcccgccgcagtcgtcgtgctggaacacggtaaaaccatgaccgagaaggagatcgtggactatgtggccagccaggttacaaccgccaagaagctgcgcggtggtgttgtgttcgtggacgaggtgcctaaaggactgaccggcaagttggacgcccgcaagatccgcgagattctcattaaggccaagaagggcggcaagatcgccgtgggctccggagagggcagaggaagtctgctaacatgcggtgacgtcgaggagaatcctggcccaatggagagcgacgagagcggcctgcccgccatggagatcgagtgccgcatcaccggcaccctgaacggcgtggagttcgagctggtgggcggcggagagggcacccccgagcagggccgcatgaccaacaagatgaagagcaccaaaggcgccctgaccttcagcccctacctgctgagccacgtgatgggctacggcttctaccacttcggcacctaccccagcggctacgagaaccccttcctgcacgccatcaacaacggcggctacaccaacacccgcatcgagaagtacgaggacggcggcgtgctgcacgtgagcttcagctaccgctacgaggccggccgcgtgatcggcgacttcaaggtgatgggcaccggcttccccgaggacagcgtgatcttcaccgacaagatcatccgcagcaacgccaccgtggagcacctgcaccccatgggcgataacgatctggatggcagcttcacccgcaccttcagcctgcgcgacggcggctactacagctccgtggtggacagccacatgcacttcaagagcgccatccaccccagcatcctgcagaacgggggccccatgttcgccttccgccgcgtggaggaggatcacagcaacaccgagctgggcatcgtggagtaccagcacgccttcaagaccccggatgcagatgccggtgaagaataagagctcgctgatcagcctcgataagatacattgatgagtttggacaaaccacaactagaatgcagtgaaaaaaatgctttatttgtgaaatttgtgatgctattgctttatttgtaaccattataagctgcaataaacaagttttaattaaggtcgggcaggaagagggcctatttcccatgattccttcatatttgcatatacgatacaaggctgttagagagataattagaattaatttgactgtaaacacaaagatattagtacaaaatacgtgacgtagaaagtaataatttcttgggtagtttgcagttttaaaattatgttttaaaatggactatcatatgcttaccgtaacttgaaagtatttcgatttcttggctttatatatcttgtggaaaggacgaaacaccgnnnnnttttttaagcttttttgaattcagctgacgtgcctcggaccgctaggaacccctagtgatggagttggccactccctctctgcgcgctcgctcgctcactgaggccgggcgaccaaaggtcgcccgacgcccgggctttgcccgggcggcctcagtgagcgagcgagcgcgcag

SEQ ID NO: 259 - DNA, 3760 bp, Artificial Sequence
  source: /note="Description of Artificial Sequence: Synthetic polynucleotide"
ctgcgcgctcgctcgctcactgaggccgcccgggcgtcgggcgacctttggtcgcccggcctcagtgagcgagcgagcgcgcagagagggagtggccaactccatcactaggggttcctgcggccgcacgcgtctagatcccatatatggagttccgcgttacataacttacggtaaatggcccgcctggctgaccgcccaacgacccccgcccattgacgtcaataatgacgtatgttcccatagtaacgccaatagggactttccattgacgtcaatgggtggagtatttacggtaaactgcccacttggcagtacatcaagtgtatcatatgccaagtacgccccctattgacgtcaatgacggtaaatggcccgcctggcattatgcccagtacatgaccttatgggactttcctacttggcagtacatctacgtattagtcatcgctattaccatggtgatgcggttttggcagtacatcaatgggcgtggatagcggtttgactcacggggatttccaagtctccaccccattgacgtcaatgggagtttgttttggcaccaaaatcaacgggactttccaaaatgtcgtaacaactccgccccattgacgcaaatgggcggtaggcgtgtacggtgggaggtctatataagcagagctcgtttagtgaaccgtcagatcgcctggagacgcaccggtgccaccatggaagatgccaaaaacattaagaagggcccagcgccattctacccactcgaagacgggaccgccggcgagcagctgcacaaagccatgaagcgctacgccctggtgcccggcaccatcgcctttaccgacgcacatatcgaggtggacattacctacgccgagtacttcgagatgagcgttcggctggcagaagctatgaagcgctatgggctgaatacaaaccatcggatcgtggtgtgcagcgagaatagcttgcagttcttcatgcccgtgttgggtgccctgttcatcggtgtggctgtggccccagctaacgacatctacaacgagcgcgagctgctgaacagcatgggcatcagccagcccaccgtcgtattcgtgagcaagaaagggctgcaaaagatcctcaacgtgcaaaagaagctaccgatcatacaaaagatcatcatcatggatagcaagaccgactaccagggcttccaaagcatgtacaccttcgtgacttcccatttgccacccggcttcaacgagtacgacttcgtgcccgagagcttcgaccgggacaaaaccatcgccctgatcatgaacagtagtggcagtaccggattgcccaagggcgtagccctaccgcaccgcaccgcttgtgtccgattcagtcatgcccgcgaccccatcttcggcaaccagatcatccccgacaccgctatcctcagcgtggtgccatttcaccacggcttcggcatgttcaccacgctgggctacttgatctgcggctttcgggtcgtgctcatgtaccgcttcgaggaggagctattcttgcgcagcttgcaagactataagattcaatctgccctgctggtgcccacactatttagcttcttcgctaagagcactctcatcgacaagtacgacctaagcaacttgcacgagatcgccagcggcggggcgccgctcagcaaggaggtaggtgaggccgtggccaaacgcttccacctaccaggcatccgccagggctacggcctgacagaaacaaccagcgccattctgatcacccccgaaggggacgacaagcctggcgcagtaggcaaggtggtgcccttcttcgaggctaaggtggtggacttggacacaggtaagacactgggtgtgaaccagcgcggcgagctgtgcgtccgtggccccatgatcatgagcggctacgttaacaaccccgaggctacaaacgctctcatcgacaaggacggctggctgcacagcggcgacatcgcctactgggacgaggacgagcacttcttcatcgtggaccggctgaagagcctgatcaaatacaagggctaccaggtagccccagccgaactggagagcatcctgctgcaacaccccaacatcttcgacgccggggtcgccggcctgcccgacgacgatgccggcgagctgcccgccgcagtcgtcgtgctggaacacggtaaaaccatgaccgagaaggagatcgtggactatgtggccagccaggttacaaccgccaagaagctgcgcggtggtgttgtgttcgtggacgaggtgcctaaaggactgaccggcaagttggacgcccgcaagatccgcgagattctcattaaggccaagaagggcggcaagatcgccgtgggctccggagagggcagaggaagtctgctaacatgcggtgacgtcgaggagaatcctggcccaatggagagcgacgagagcggcctgcccgccatggagatcgagtgccgcatcaccggcaccctgaacggcgtggagttcgagctggtgggcggcggagagggcacccccgagcagggccgcatgaccaacaagatgaagagcaccaaaggcgccctgaccttcagcccctacctgctgagccacgtgatgggctacggcttctaccacttcggcacctaccccagcggctacgagaaccccttcctgcacgccatcaacaacggcggctacaccaacacccgcatcgagaagtacgaggacggcggcgtgctgcacgtgagcttcagctaccgctacgaggccggccgcgtgatcggcgacttcaaggtgatgggcaccggcttccccgaggacagcgtgatcttcaccgacaagatcatccgcagcaacgccaccgtggagcacctgcaccccatgggcgataacgatctggatggcagcttcacccgcaccttcagcctgcgcgacggcggctactacagctccgtggtggacagccacatgcacttcaagagcgccatccaccccagcatcctgcagaacgggggccccatgttcgccttccgccgcgtggaggaggatcacagcaacaccgagctgggcatcgtggagtaccagcacgccttcaagaccccggatgcagatgccggtgaagaataagagctcgctgatcagcctcgataagatacattgatgagtttggacaaaccacaactagaatgcagtgaaaaaaatgctttatttgtgaaatttgtgatgctattgctttatttgtaaccattataagctgcaataaacaagttttaattaaggtcgggcaggaagagggcctatttcccatgattccttcatatttgcatatacgatacaaggctgttagagagataattagaattaatttgactgtaaacacaaagatattagtacaaaatacgtgacgtagaaagtaataatttcttgggtagtttgcagttttaaaattatgttttaaaatggactatcatatgcttaccgtaacttgaaagtatttcgatttcttggctttatatatcttgtggaaaggacgaaacaccgtcctcatcttggaattcgtgatgcgaacatcacgaattccaagatgaggattttttaagcttttttgaattcagctgacgtgcctcggaccgctaggaacccctagtgatggagttggccactccctctctgcgcgctcgctcgctcactgaggccgggcgaccaaaggtcgcccgacgcccgggctttgcccgggcggcctcagtgagcgagcgagcgcgcag

SEQ ID NO: 260 - DNA, 3760 bp, Artificial Sequence
  source: /note="Description of Artificial Sequence: Synthetic polynucleotide"
ctgcgcgctcgctcgctcactgaggccgcccgggcgtcgggcgacctttggtcgcccggcctcagtgagcgagcgagcgcgcagagagggagtggccaactccatcactaggggttcctgcggccgcacgcgtctagatcccatatatggagttccgcgttacataacttacggtaaatggcccgcctggctgaccgcccaacgacccccgcccattgacgtcaataatgacgtatgttcccatagtaacgccaatagggactttccattgacgtcaatgggtggagtatttacggtaaactgcccacttggcagtacatcaagtgtatcatatgccaagtacgccccctattgacgtcaatgacggtaaatggcccgcctggcattatgcccagtacatgaccttatgggactttcctacttggcagtacatctacgtattagtcatcgctattaccatggtgatgcggttttggcagtacatcaatgggcgtggatagcggtttgactcacggggatttccaagtctccaccccattgacgtcaatgggagtttgttttggcaccaaaatcaacgggactttccaaaatgtcgtaacaactccgccccattgacgcaaatgggcggtaggcgtgtacggtgggaggtctatataagcagagctcgtttagtgaaccgtcagatcgcctggagacgcaccggtgccaccatggaagatgccaaaaacattaagaagggcccagcgccattctacccactcgaagacgggaccgccggcgagcagctgcacaaagccatgaagcgctacgccctggtgcccggcaccatcgcctttaccgacgcacatatcgaggtggacattacctacgccgagtacttcgagatgagcgttcggctggcagaagctatgaagcgctatgggctgaatacaaaccatcggatcgtggtgtgcagcgagaatagcttgcagttcttcatgcccgtgttgggtgccctgttcatcggtgtggctgtggccccagctaacgacatctacaacgagcgcgagctgctgaacagcatgggcatcagccagcccaccgtcgtattcgtgagcaagaaagggctgcaaaagatcctcaacgtgcaaaagaagctaccgatcatacaaaagatcatcatcatggatagcaagaccgactaccagggcttccaaagcatgtacaccttcgtgacttcccatttgccacccggcttcaacgagtacgacttcgtgcccgagagcttcgaccgggacaaaaccatcgccctgatcatgaacagtagtggcagtaccggattgcccaagggcgtagccctaccgcaccgcaccgcttgtgtccgattcagtcatgcccgcgaccccatcttcggcaaccagatcatccccgacaccgctatcctcagcgtggtgccatttcaccacggcttcggcatgttcaccacgctgggctacttgatctgcggctttcgggtcgtgctcatgtaccgcttcgaggaggagctattcttgcgcagcttgcaagactataagattcaatctgccctgctggtgcccacactatttagcttcttcgctaagagcactctcatcgacaagtacgacctaagcaacttgcacgagatcgccagcggcggggcgccgctcagcaaggaggtaggtgaggccgtggccaaacgcttccacctaccaggcatccgccagggctacggcctgacagaaacaaccagcgccattctgatcacccccgaaggggacgacaagcctggcgcagtaggcaaggtggtgcccttcttcgaggctaaggtggtggacttggacacaggtaagacactgggtgtgaaccagcgcggcgagctgtgcgtccgtggccccatgatcatgagcggctacgttaacaaccccgaggctacaaacgctctcatcgacaaggacggctggctgcacagcggcgacatcgcctactgggacgaggacgagcacttcttcatcgtggaccggctgaagagcctgatcaaatacaagggctaccaggtagccccagccgaactggagagcatcctgctgcaacaccccaacatcttcgacgccggggtcgccggcctgcccgacgacgatgccggcgagctgcccgccgcagtcgtcgtgctggaacacggtaaaaccatgaccgagaaggagatcgtggactatgtggccagccaggttacaaccgccaagaagctgcgcggtggtgttgtgttcgtggacgaggtgcctaaaggactgaccggcaagttggacgcccgcaagatccgcgagattctcattaaggccaagaagggcggcaagatcgccgtgggctccggagagggcagaggaagtctgctaacatgcggtgacgtcgaggagaatcctggcccaatggagagcgacgagagcggcctgcccgccatggagatcgagtgccgcatcaccggcaccctgaacggcgtggagttcgagctggtgggcggcggagagggcacccccgagcagggccgcatgaccaacaagatgaagagcaccaaaggcgccctgaccttcagcccctacctgctgagccacgtgatgggctacggcttctaccacttcggcacctaccccagcggctacgagaaccccttcctgcacgccatcaacaacggcggctacaccaacacccgcatcgagaagtacgaggacggcggcgtgctgcacgtgagcttcagctaccgctacgaggccggccgcgtgatcggcgacttcaaggtgatgggcaccggcttccccgaggacagcgtgatcttcaccgacaagatcatccgcagcaacgccaccgtggagcacctgcaccccatgggcgataacgatctggatggcagcttcacccgcaccttcagcctgcgcgacggcggctactacagctccgtggtggacagccacatgcacttcaagagcgccatccaccccagcatcctgcagaacgggggccccatgttcgccttccgccgcgtggaggaggatcacagcaacaccgagctgggcatcgtggagtaccagcacgccttcaagaccccggatgcagatgccggtgaagaataagagctcgctgatcagcctcgataagatacattgatgagtttggacaaaccacaactagaatgcagtgaaaaaaatgctttatttgtgaaatttgtgatgctattgctttatttgtaaccattataagctgcaataaacaagttttaattaaggtcgggcaggaagagggcctatttcccatgattccttcatatttgcatatacgatacaaggctgttagagagataattagaattaatttgactgtaaacacaaagatattagtacaaaatacgtgacgtagaaagtaataatttcttgggtagtttgcagttttaaaattatgttttaaaatggactatcatatgcttaccgtaacttgaaagtatttcgatttcttggctttatatatcttgtggaaaggacgaaacaccgcgccttactgggcatctctttctcgaaagaaagagatgcccagtaaggcgttttttaagcttttttgaattcagctgacgtgcctcggaccgctaggaacccctagtgatggagttggccactccctctctgcgcgctcgctcgctcactgaggccgggcgaccaaaggtcgcccgacgcccgggctttgcccgggcggcctcagtgagcgagcgagcgcgcag

SEQ ID NO: 261 - DNA, 3756 bp, Artificial Sequence
  source: /note="Description of Artificial Sequence: Synthetic polynucleotide"
ctgcgcgctcgctcgctcactgaggccgcccgggcgtcgggcgacctttggtcgcccggcctcagtgagcgagcgagcgcgcagagagggagtggccaactccatcactaggggttcctgcggccgcacgcgtctagatcccatatatggagttccgcgttacataacttacggtaaatggcccgcctggctgaccgcccaacgacccccgcccattgacgtcaataatgacgtatgttcccatagtaacgccaatagggactttccattgacgtcaatgggtggagtatttacggtaaactgcccacttggcagtacatcaagtgtatcatatgccaagtacgccccctattgacgtcaatgacggtaaatggcccgcctggcattatgcccagtacatgaccttatgggactttcctacttggcagtacatctacgtattagtcatcgctattaccatggtgatgcggttttggcagtacatcaatgggcgtggatagcggtttgactcacggggatttccaagtctccaccccattgacgtcaatgggagtttgttttggcaccaaaatcaacgggactttccaaaatgtcgtaacaactccgccccattgacgcaaatgggcggtaggcgtgtacggtgggaggtctatataagcagagctcgtttagtgaaccgtcagatcgcctggagacgcaccggtgccaccatggaagatgccaaaaacattaagaagggcccagcgccattctacccactcgaagacgggaccgccggcgagcagctgcacaaagccatgaagcgctacgccctggtgcccggcaccatcgcctttaccgacgcacatatcgaggtggacattacctacgccgagtacttcgagatgagcgttcggctggcagaagctatgaagcgctatgggctgaatacaaaccatcggatcgtggtgtgcagcgagaatagcttgcagttcttcatgcccgtgttgggtgccctgttcatcggtgtggctgtggccccagctaacgacatctacaacgagcgcgagctgctgaacagcatgggcatcagccagcccaccgtcgtattcgtgagcaagaaagggctgcaaaagatcctcaacgtgcaaaagaagctaccgatcatacaaaagatcatcatcatggatagcaagaccgactaccagggcttccaaagcatgtacaccttcgtgacttcccatttgccacccggcttcaacgagtacgacttcgtgcccgagagcttcgaccgggacaaaaccatcgccctgatcatgaacagtagtggcagtaccggattgcccaagggcgtagccctaccgcaccgcaccgcttgtgtccgattcagtcatgcccgcgaccccatcttcggcaaccagatcatccccgacaccgctatcctcagcgtggtgccatttcaccacggcttcggcatgttcaccacgctgggctacttgatctgcggctttcgggtcgtgctcatgtaccgcttcgaggaggagctattcttgcgcagcttgcaagactataagattcaatctgccctgctggtgcccacactatttagcttcttcgctaagagcactctcatcgacaagtacgacctaagcaacttgcacgagatcgccagcggcggggcgccgctcagcaaggaggtaggtgaggccgtggccaaacgcttccacctaccaggcatccgccagggctacggcctgacagaaacaaccagcgccattctgatcacccccgaaggggacgacaagcctggcgcagtaggcaaggtggtgcccttcttcgaggctaaggtggtggacttggacacaggtaagacactgggtgtgaaccagcgcggcgagctgtgcgtccgtggccccatgatcatgagcggctacgttaacaaccccgaggctacaaacgctctcatcgacaaggacggctggctgcacagcggcgacatcgcctactgggacgaggacgagcacttcttcatcgtggaccggctgaagagcctgatcaaatacaagggctaccaggtagccccagccgaactggagagcatcctgctgcaacaccccaacatcttcgacgccggggtcgccggcctgcccgacgacgatgccggcgagctgcccgccgcagtcgtcgtgctggaacacggtaaaaccatgaccgagaaggagatcgtggactatgtggccagccaggttacaaccgccaagaagctgcgcggtggtgttgtgttcgtggacgaggtgcctaaaggactgaccggcaagttggacgcccgcaagatccgcgagattctcattaaggccaagaagggcggcaagatcgccgtgggctccggagagggcagaggaagtctgctaacatgcggtgacgtcgaggagaatcctggcccaatggagagcgacgagagcggcctgcccgccatggagatcgagtgccgcatcaccggcaccctgaacggcgtggagttcgagctggtgggcggcggagagggcacccccgagcagggccgcatgaccaacaagatgaagagcaccaaaggcgccctgaccttcagcccctacctgctgagccacgtgatgggctacggcttctaccacttcggcacctaccccagcggctacgagaaccccttcctgcacgccatcaacaacggcggctacaccaacacccgcatcgagaagtacgaggacggcggcgtgctgcacgtgagcttcagctaccgctacgaggccggccgcgtgatcggcgacttcaaggtgatgggcaccggcttccccgaggacagcgtgatcttcaccgacaagatcatccgcagcaacgccaccgtggagcacctgcaccccatgggcgataacgatctggatggcagcttcacccgcaccttcagcctgcgcgacggcggctactacagctccgtggtggacagccacatgcacttcaagagcgccatccaccccagcatcctgcagaacgggggccccatgttcgccttccgccgcgtggaggaggatcacagcaacaccgagctgggcatcgtggagtaccagcacgccttcaagaccccggatgcagatgccggtgaagaataagagctcgctgatcagcctcgataagatacattgatgagtttggacaaaccacaactagaatgcagtgaaaaaaatgctttatttgtgaaatttgtgatgctattgctttatttgtaaccattataagctgcaataaacaagttttaattaaggtcgggcaggaagagggcctatttcccatgattccttcatatttgcatatacgatacaaggctgttagagagataattagaattaatttgactgtaaacacaaagatattagtacaaaatacgtgacgtagaaagtaataatttcttgggtagtttgcagttttaaaattatgttttaaaatggactatcatatgcttaccgtaacttgaaagtatttcgatttcttggctttatatatcttgtggaaaggacgaaacaccgctggtactactatgacagtatcgaaatactgtcatagtagtaccagttttttaagcttttttgaattcagctgacgtgcctcggaccgctaggaacccctagtgatggagttggccactccctctctgcgcgctcgctcgctcactgaggccgggcgaccaaaggtcgcccgacgcccgggctttgcccgggcggcctcagtgagcgagcgagcgcgcag

SEQ ID NO: 262 - DNA, 3756 bp, Artificial Sequence
  source: /note="Description of Artificial Sequence: Synthetic polynucleotide"
ctgcgcgctcgctcgctcactgaggccgcccgggcgtcgggcgacctttggtcgcccggcctcagtgagcgagcgagcgcgcagagagggagtggccaactccatcactaggggttcctgcggccgcacgcgtctagatcccatatatggagttccgcgttacataacttacggtaaatggcccgcctggctgaccgcccaacgacccccgcccattgacgtcaataatgacgtatgttcccatagtaacgccaatagggactttccattgacgtcaatgggtggagtatttacggtaaactgcccacttggcagtacatcaagtgtatcatatgccaagtacgccccctattgacgtcaatgacggtaaatggcccgcctggcattatgcccagtacatgaccttatgggactttcctacttggcagtacatctacgtattagtcatcgctattaccatggtgatgcggttttggcagtacatcaatgggcgtggatagcggtttgactcacggggatttccaagtctccaccccattgacgtcaatgggagtttgttttggcaccaaaatcaacgggactttccaaaatgtcgtaacaactccgccccattgacgcaaatgggcggtaggcgtgtacggtgggaggtctatataagcagagctcgtttagtgaaccgtcagatcgcctggagacgcaccggtgccaccatggaagatgccaaaaacattaagaagggcccagcgccattctacccactcgaagacgggaccgccggcgagcagctgcacaaagccatgaagcgctacgccctggtgcccggcaccatcgcctttaccgacgcacatatcgaggtggacattacctacgccgagtacttcgagatgagcgttcggctggcagaagctatgaagcgctatgggctgaatacaaaccatcggatcgtggtgtgcagcgagaatagcttgcagttcttcatgcccgtgttgggtgccctgttcatcggtgtggctgtggccccagctaacgacatctacaacgagcgcgagctgctgaacagcatgggcatcagccagcccaccgtcgtattcgtgagcaagaaagggctgcaaaagatcctcaacgtgcaaaagaagctaccgatcatacaaaagatcatcatcatggatagcaagaccgactaccagggcttccaaagcatgtacaccttcgtgacttcccatttgccacccggcttcaacgagtacgacttcgtgcccgagagcttcgaccgggacaaaaccatcgccctgatcatgaacagtagtggcagtaccggattgcccaagggcgtagccctaccgcaccgcaccgcttgtgtccgattcagtcatgcccgcgaccccatcttcggcaaccagatcatccccgacaccgctatcctcagcgtggtgccatttcaccacggcttcggcatgttcaccacgctgggctacttgatctgcggctttcgggtcgtgctcatgtaccgcttcgaggaggagctattcttgcgcagcttgcaagactataagattcaatctgccctgctggtgcccacactatttagcttcttcgctaagagcactctcatcgacaagtacgacctaagcaacttgcacgagatcgccagcggcggggcgccgctcagcaaggaggtaggtgaggccgtggccaaacgcttccacctaccaggcatccgccagggctacggcctgacagaaacaaccagcgccattctgatcacccccgaaggggacgacaagcctggcgcagtaggcaaggtggtgcccttcttcgaggctaaggtggtggacttggacacaggtaagacactgggtgtgaaccagcgcggcgagctgtgcgtccgtggccccatgatcatgagcggctacgttaacaaccccgaggctacaaacgctctcatcgacaaggacggctggctgcacagcggcgacatcgcctactgggacgaggacgagcacttcttcatcgtggaccggctgaagagcctgatcaaatacaagggctaccaggtagccccagccgaactggagagcatcctgctgcaacaccccaacatcttcgacgccggggtcgccggcctgcccgacgacgatgccggcgagctgcccgccgcagtcgtcgtgctggaacacggtaaaaccatgaccgagaaggagatcgtggactatgtggccagccaggttacaaccgccaagaagctgcgcggtggtgttgtgttcgtggacgaggtgcctaaaggactgaccggcaagttggacgcccgcaagatccgcgagattctcattaaggccaagaagggcggcaagatcgccgtgggctccggagagggcagaggaagtctgctaacatgcggtgacgtcgaggagaatcctggcccaatggagagcgacgagagcggcctgcccgccatggagatcgagtgccgcatcaccggcaccctgaacggcgtggagttcgagctggtgggcggcggagagggcacccccgagcagggccgcatgaccaacaagatgaagagcaccaaaggcgccctgaccttcagcccctacctgctgagccacgtgatgggctacggcttctaccacttcggcacctaccccagcggctacgagaaccccttcctgcacgccatcaacaacggcggctacaccaacacccgcatcgagaagtacgaggacggcggcgtgctgcacgtgagcttcagctaccgctacgaggccggccgcgtgatcggcgacttcaaggtgatgggcaccggcttccccgaggacagcgtgatcttcaccgacaagatcatccgcagcaacgccaccgtggagcacctgcaccccatgggcgataacgatctggatggcagcttcacccgcaccttcagcctgcgcgacggcggctactacagctccgtggtggacagccacatgcacttcaagagcgccatccaccccagcatcctgcagaacgggggccccatgttcgccttccgccgcgtggaggaggatcacagcaacaccgagctgggcatcgtggagtaccagcacgccttcaagaccccggatgcagatgccggtgaagaataagagctcgctgatcagcctcgataagatacattgatgagtttggacaaaccacaactagaatgcagtgaaaaaaatgctttatttgtgaaatttgtgatgctattgctttatttgtaaccattataagctgcaataaacaagttttaattaaggtcgggcaggaagagggcctatttcccatgattccttcatatttgcatatacgatacaaggctgttagagagataattagaattaatttgactgtaaacacaaagatattagtacaaaatacgtgacgtagaaagtaataatttcttgggtagtttgcagttttaaaattatgttttaaaatggactatcatatgcttaccgtaacttgaaagtatttcgatttcttggctttatatatcttgtggaaaggacgaaacaccgaagtagcagaggagaagagctcgaaagctcttctcctctgctacttttttttaagcttttttgaattcagctgacgtgcctcggaccgctaggaacccctagtgatggagttggccactccctctctgcgcgctcgctcgctcactgaggccgggcgaccaaaggtcgcccgacgcccgggctttgcccgggcggcctcagtgagcgagcgagcgcgcag

SEQ ID NO: 263 - DNA, 3755 bp, Artificial Sequence
  source: /note="Description of Artificial Sequence: Synthetic polynucleotide"
ctgcgcgctcgctcgctcactgaggccgcccgggcgtcgggcgacctttggtcgcccggcctcagtgagcgagcgagcgcgcagagagggagtggccaactccatcactaggggttcctgcggccgcacgcgtctagatcccatatatggagttccgcgttacataacttacggtaaatggcccgcctggctgaccgcccaacgacccccgcccattgacgtcaataatgacgtatgttcccatagtaacgccaatagggactttccattgacgtcaatgggtggagtatttacggtaaactgcccacttggcagtacatcaagtgtatcatatgccaagtacgccccctattgacgtcaatgacggtaaatggcccgcctggcattatgcccagtacatgaccttatgggactttcctacttggcagtacatctacgtattagtcatcgctattaccatggtgatgcggttttggcagtacatcaatgggcgtggatagcggtttgactcacggggatttccaagtctccaccccattgacgtcaatgggagtttgttttggcaccaaaatcaacgggactttccaaaatgtcgtaacaactccgccccattgacgcaaatgggcggtaggcgtgtacggtgggaggtctatataagcagagctcgtttagtgaaccgtcagatcgcctggagacgcaccggtgccaccatggaagatgccaaaaacattaagaagggcccagcgccattctacccactcgaagacgggaccgccggcgagcagctgcacaaagccatgaagcgctacgccctggtgcccggcaccatcgcctttaccgacgcacatatcgaggtggacattacctacgccgagtacttcgagatgagcgttcggctggcagaagctatgaagcgctatgggctgaatacaaaccatcggatcgtggtgtgcagcgagaatagcttgcagttcttcatgcccgtgttgggtgccctgttcatcggtgtggctgtggccccagctaacgacatctacaacgagcgcgagctgctgaacagcatgggcatcagccagcccaccgtcgtattcgtgagcaagaaagggctgcaaaagatcctcaacgtgcaaaagaagctaccgatcatacaaaagatcatcatcatggatagcaagaccgactaccagggcttccaaagcatgtacaccttcgtgacttcccatttgccacccggcttcaacgagtacgacttcgtgcccgagagcttcgaccgggacaaaaccatcgccctgatcatgaacagtagtggcagtaccggattgcccaagggcgtagccctaccgcaccgcaccgcttgtgtccgattcagtcatgcccgcgaccccatcttcggcaaccagatcatccccgacaccgctatcctcagcgtggtgccatttcaccacggcttcggcatgttcaccacgctgggctacttgatctgcggctttcgggtcgtgctcatgtaccgcttcgaggaggagctattcttgcgcagcttgcaagactataagattcaatctgccctgctggtgcccacactatttagcttcttcgctaagagcactctcatcgacaagtacgacctaagcaacttgcacgagatcgccagcggcggggcgccgctcagcaaggaggtaggtgaggccgtggccaaacgcttccacctaccaggcatccgccagggctacggcctgacagaaacaaccagcgccattctgatcacccccgaaggggacgacaagcctggcgcagtaggcaaggtggtgcccttcttcgaggctaaggtggtggacttggacacaggtaagacactgggtgtgaaccagcgcggcgagctgtgcgtccgtggccccatgatcatgagcggctacgttaacaaccccgaggctacaaacgctctcatcgacaaggacggctggctgcacagcggcgacatcgcctactgggacgaggacgagcacttcttcatcgtggaccggctgaagagcctgatcaaatacaagggctaccaggtagccccagccgaactggagagcatcctgctgcaacaccccaacatcttcgacgccggggtcgccggcctgcccgacgacgatgccggcgagctgcccgccgcagtcgtcgtgctggaacacggtaaaaccatgaccgagaaggagatcgtggactatgtggccagccaggttacaaccgccaagaagctgcgcggtggtgttgtgttcgtggacgaggtgcctaaaggactgaccggcaagttggacgcccgcaagatccgcgagattctcattaaggccaagaagggcggcaagatcgccgtgggctccggagagggcagaggaagtctgctaacatgcggtgacgtcgaggagaatcctggcccaatggagagcgacgagagcggcctgcccgccatggagatcgagtgccgcatcaccggcaccctgaacggcgtggagttcgagctggtgggcggcggagagggcacccccgagcagggccgcatgaccaacaagatgaagagcaccaaaggcgccctgaccttcagcccctacctgctgagccacgtgatgggctacggcttctaccacttcggcacctaccccagcggctacgagaaccccttcctgcacgccatcaacaacggcggctacaccaacacccgcatcgagaagtacgaggacggcggcgtgctgcacgtgagcttcagctaccgctacgaggccggccgcgtgatcggcgacttcaaggtgatgggcaccggcttccccgaggacagcgtgatcttcaccgacaagatcatccgcagcaacgccaccgtggagcacctgcaccccatgggcgataacgatctggatggcagcttcacccgcaccttcagcctgcgcgacggcggctactacagctccgtggtggacagccacatgcacttcaagagcgccatccaccccagcatcctgcagaacgggggccccatgttcgccttccgccgcgtggaggaggatcacagcaacaccgagctgggcatcgtggagtaccagcacgccttcaagaccccggatgcagatgccggtgaagaataagagctcgctgatcagcctcgataagatacattgatgagtttggacaaaccacaactagaatgcagtgaaaaaaatgctttatttgtgaaatttgtgatgctattgctttatttgtaaccattataagctgcaataaacaagttttaattaaggtcgggcaggaagagggcctatttcccatgattccttcatatttgcatatacgatacaaggctgttagagagataattagaattaatttgactgtaaacacaaagatattagtacaaaatacgtgacgtagaaagtaataatttcttgggtagtttgcagttttaaaattatgttttaaaatggactatcatatgcttaccgtaacttgaaagtatttcgatttcttggctttatatatcttgtggaaaggacgaaacaccgaagacagtcatccgctccatccgaagatggagcggatgactgtcttttttttaagcttttttgaattcagctgacgtgcctcggaccgctaggaacccctagtgatggagttggccactccctctctgcgcgctcgctcgctcactgaggccgggcgaccaaaggtcgcccgacgcccgggctttgcccgggcggcctcagtgagcgagcgagcgcgca

SEQ ID NO: 264 - DNA, 3756 bp, Artificial Sequence
  source: /note="Description of Artificial Sequence: Synthetic polynucleotide"
ctgcgcgctcgctcgctcactgaggccgcccgggcgtcgggcgacctttggtcgcccggcctcagtgagcgagcgagcgcgcagagagggagtggccaactccatcactaggggttcctgcggccgcacgcgtctagatcccatatatggagttccgcgttacataacttacggtaaatggcccgcctggctgaccgcccaacgacccccgcccattgacgtcaataatgacgtatgttcccatagtaacgccaatagggactttccattgacgtcaatgggtggagtatttacggtaaactgcccacttggcagtacatcaagtgtatcatatgccaagtacgccccctattgacgtcaatgacggtaaatggcccgcctggcattatgcccagtacatgaccttatgggactttcctacttggcagtacatctacgtattagtcatcgctattaccatggtgatgcggttttggcagtacatcaatgggcgtggatagcggtttgactcacggggatttccaagtctccaccccattgacgtcaatgggagtttgttttggcaccaaaatcaacgggactttccaaaatgtcgtaacaactccgccccattgacgcaaatgggcggtaggcgtgtacggtgggaggtctatataagcagagctcgtttagtgaaccgtcagatcgcctggagacgcaccggtgccaccatggaagatgccaaaaacattaagaagggcccagcgccattctacccactcgaagacgggaccgccggcgagcagctgcacaaagccatgaagcgctacgccctggtgcccggcaccatcgcctttaccgacgcacatatcgaggtggacattacctacgccgagtacttcgagatgagcgttcggctggcagaagctatgaagcgctatgggctgaatacaaaccatcggatcgtggtgtgcagcgagaatagcttgcagttcttcatgcccgtgttgggtgccctgttcatcggtgtggctgtggccccagctaacgacatctacaacgagcgcgagctgctgaacagcatgggcatcagccagcccaccgtcgtattcgtgagcaagaaagggctgcaaaagatcctcaacgtgcaaaagaagctaccgatcatacaaaagatcatcatcatggatagcaagaccgactaccagggcttccaaagcatgtacaccttcgtgacttcccatttgccacccggcttcaacgagtacgacttcgtgcccgagagcttcgaccgggacaaaaccatcgccctgatcatgaacagtagtggcagtaccggattgcccaagggcgtagccctaccgcaccgcaccgcttgtgtccgattcagtcatgcccgcgaccccatcttcggcaaccagatcatccccgacaccgctatcctcagcgtggtgccatttcaccacggcttcggcatgttcaccacgctgggctacttgatctgcggctttcgggtcgtgctcatgtaccgcttcgaggaggagctattcttgcgcagcttgcaagactataagattcaatctgccctgctggtgcccacactatttagcttcttcgctaagagcactctcatcgacaagtacgacctaagcaacttgcacgagatcgccagcggcggggcgccgctcagcaaggaggtaggtgaggccgtggccaaacgcttccacctaccaggcatccgccagggctacggcctgacagaaacaaccagcgccattctgatcacccccgaaggggacgacaagcctggcgcagtaggcaaggtggtgcccttcttcgaggctaaggtggtggacttggacacaggtaagacactgggtgtgaaccagcgcggcgagctgtgcgtccgtggccccatgatcatgagcggctacgttaacaaccccgaggctacaaacgctctcatcgacaaggacggctggctgcacagcggcgacatcgcctactgggacgaggacgagcacttcttcatcgtggaccggctgaagagcctgatcaaatacaagggctaccaggtagccccagccgaactggagagcatcctgctgcaacaccccaacatcttcgacgccggggtcgccggcctgcccgacgacgatgccggcgagctgcccgccgcagtcgtcgtgctggaacacggtaaaaccatgaccgagaaggagatcgtggactatgtggccagccaggttacaaccgccaagaagctgcgcggtggtgttgtgttcgtggacgaggtgcctaaaggactgaccggcaagttggacgcccgcaagatccgcgagattctcattaaggccaagaagggcggcaagatcgccgtgggctccggagagggcagaggaagtctgctaacatgcggtgacgtcgaggagaatcctggcccaatggagagcgacgagagcggcctgcccgccatggagatcgagtgccgcatcaccggcaccctgaacggcgtggagttcgagctggtgggcggcggagagggcacccccgagcagggccgcatgaccaacaagatgaagagcaccaaaggcgccctgaccttcagcccctacctgctgagccacgtgatgggctacggcttctaccacttcggcacctaccccagcggctacgagaaccccttcctgcacgccatcaacaacggcggctacaccaacacccgcatcgagaagtacgaggacggcggcgtgctgcacgtgagcttcagctaccgctacgaggccggccgcgtgatcggcgacttcaaggtgatgggcaccggcttccccgaggacagcgtgatcttcaccgacaagatcatccgcagcaacgccaccgtggagcacctgcaccccatgggcgataacgatctggatggcagcttcacccgcaccttcagcctgcgcgacggcggctactacagctccgtggtggacagccacatgcacttcaagagcgccatccaccccagcatcctgcagaacgggggccccatgttcgccttccgccgcgtggaggaggatcacagcaacaccgagctgggcatcgtggagtaccagcacgccttcaagaccccggatgcagatgccggtgaagaataagagctcgctgatcagcctcgataagatacattgatgagtttggacaaaccacaactagaatgcagtgaaaaaaatgctttatttgtgaaatttgtgatgctattgctttatttgtaaccattataagctgcaataaacaagttttaattaaggtcgggcaggaagagggcctatttcccatgattccttcatatttgcatatacgatacaaggctgttagagagataattagaattaatttgactgtaaacacaaagatattagtacaaaatacgtgacgtagaaagtaataatttcttgggtagtttgcagttttaaaattatgttttaaaatggactatcatatgcttaccgtaacttgaaagtatttcgatttcttggctttatatatcttgtggaaaggacgaaacaccgaaggacgtcattgagcagtaccgaagtactgctcaatgacgtccttttttttaagcttttttgaattcagctgacgtgcctcggaccgctaggaacccctagtgatggagttggccactccctctctgcgcgctcgctcgctcactgaggccgggcgaccaaaggtcgcccgacgcccgggctttgcccgggcggcctcagtgagcgagcgagcgcgcag

SEQ ID NO: 265 - DNA, 3756 bp, Artificial Sequence
  source: /note="Description of Artificial Sequence: Synthetic polynucleotide"
ctgcgcgctcgctcgctcactgaggccgcccgggcgtcgggcgacctttggtcgcccggcctcagtgagcgagcgagcgcgcagagagggagtggccaactccatcactaggggttcctgcggccgcacgcgtctagatcccatatatggagttccgcgttacataacttacggtaaatggcccgcctggctgaccgcccaacgacccccgcccattgacgtcaataatgacgtatgttcccatagtaacgccaatagggactttccattgacgtcaatgggtggagtatttacggtaaactgcccacttggcagtacatcaagtgtatcatatgccaagtacgccccctattgacgtcaatgacggtaaatggcccgcctggcattatgcccagtacatgaccttatgggactttcctacttggcagtacatctacgtattagtcatcgctattaccatggtgatgcggttttggcagtacatcaatgggcgtggatagcggtttgactcacggggatttccaagtctccaccccattgacgtcaatgggagtttgttttggcaccaaaatcaacgggactttccaaaatgtcgtaacaactccgccccattgacgcaaatgggcggtaggcgtgtacggtgggaggtctatataagcagagctcgtttagtgaaccgtcagatcgcctggagacgcaccggtgccaccatggaagatgccaaaaacattaagaagggcccagcgccattctacccactcgaagacgggaccgccggcgagcagctgcacaaagccatgaagcgctacgccctggtgcccggcaccatcgcctttaccgacgcacatatcgaggtggacattacctacgccgagtacttcgagatgagcgttcggctggcagaagctatgaagcgctatgggctgaatacaaaccatcggatcgtggtgtgcagcgagaatagcttgcagttcttcatgcccgtgttgggtgccctgttcatcggtgtggctgtggccccagctaacgacatctacaacgagcgcgagctgctgaacagcatgggcatcagccagcccaccgtcgtattcgtgagcaagaaagggctgcaaaagatcctcaacgtgcaaaagaagctaccgatcatacaaaagatcatcatcatggatagcaagaccgactaccagggcttccaaagcatgtacaccttcgtgacttcccatttgccacccggcttcaacgagtacgacttcgtgcccgagagcttcgaccgggacaaaaccatcgccctgatcatgaacagtagtggcagtaccggattgcccaagggcgtagccctaccgcaccgcaccgcttgtgtccgattcagtcatgcccgcgaccccatcttcggcaaccagatcatccccgacaccgctatcctcagcgtggtgccatttcaccacggcttcggcatgttcaccacgctgggctacttgatctgcggctttcgggtcgtgctcatgtaccgcttcgaggaggagctattcttgcgcagcttgcaagactataagattcaatctgccctgctggtgcccacactatttagcttcttcgctaagagcactctcatcgacaagtacgacctaagcaacttgcacgagatcgccagcggcggggcgccgctcagcaaggaggtaggtgaggccgtggccaaacgcttccacctaccaggcatccgccagggctacggcctgacagaaacaaccagcgccattctgatcacccccgaaggggacgacaagcctggcgcagtaggcaaggtggtgcccttcttcgaggctaaggtggtggacttggacacaggtaagacactgggtgtgaaccagcgcggcgagctgtgcgtccgtggccccatgatcatgagcggctacgttaacaaccccgaggctacaaacgctctcatcgacaaggacggctggctgcacagcggcgacatcgcctactgggacgaggacgagcacttcttcatcgtggaccggctgaagagcctgatcaaatacaagggctaccaggtagccccagccgaactggagagcatcctgctgcaacaccccaacatcttcgacgccggggtcgccggcctgcccgacgacgatgccggcgagctgcccgccgcagtcgtcgtgctggaacacggtaaaaccatgaccgagaaggagatcgtggactatgtggccagccaggttacaaccgccaagaagctgcgcggtggtgttgtgttcgtggacgaggtgcctaaaggactgaccggcaagttggacgcccgcaagatccgcgagattctcattaaggccaagaagggcggcaagatcgccgtgggctccggagagggcagaggaagtctgctaacatgcggtgacgtcgaggagaatcctggcccaatggagagcgacgagagcggcctgcccgccatggagatcgagtgccgcatcaccggcaccctgaacggcgtggagttcgagctggtgggcggcggagagggcacccccgagcagggccgcatgaccaacaagatgaagagcaccaaaggcgccctgaccttcagcccctacctgctgagccacgtgatgggctacggcttctaccacttcggcacctaccccagcggctacgagaaccccttcctgcacgccatcaacaacggcggctacaccaacacccgcatcgagaagtacgaggacggcggcgtgctgcacgtgagcttcagctaccgctacgaggccggccgcgtgatcggcgacttcaaggtgatgggcaccggcttccccgaggacagcgtgatcttcaccgacaagatcatccgcagcaacgccaccgtggagcacctgcaccccatgggcgataacgatctggatggcagcttcacccgcaccttcagcctgcgcgacggcggctactacagctccgtggtggacagccacatgcacttcaagagcgccatccaccccagcatcctgcagaacgggggccccatgttcgccttccgccgcgtggaggaggatcacagcaacaccgagctgggcatcgtggagtaccagcacgccttcaagaccccggatgcagatgccggtgaagaataagagctcgctgatcagcctcgataagatacattgatgagtttggacaaaccacaactagaatgcagtgaaaaaaatgctttatttgtgaaatttgtgatgctattgctttatttgtaaccattataagctgcaataaacaagttttaattaaggtcgggcaggaagagggcctatttcccatgattccttcatatttgcatatacgatacaaggctgttagagagataattagaattaatttgactgtaaacacaaagatattagtacaaaatacgtgacgtagaaagtaataatttcttgggtagtttgcagttttaaaattatgttttaaaatggactatcatatgcttaccgtaacttgaaagtatttcgatttcttggctttatatatcttgtggaaaggacgaaacaccggccggatcaagagcctgcaaacgaatttgcaggctcttgatccggcttttttaagcttttttgaattcagctgacgtgcctcggaccgctaggaacccctagtgatggagttggccactccctctctgcgcgctcgctcgctcactgaggccgggcgaccaaaggtcgcccgacgcccgggctttgcccgggcggcctcagtgagcgagcgagcgcgcag

SEQ ID NO: 266 - DNA, 3756 bp, Artificial Sequence
  source: /note="Description of Artificial Sequence: Synthetic polynucleotide"
ctgcgcgctcgctcgctcactgaggccgcccgggcgtcgggcgacctttggtcgcccggcctcagtgagcgagcgagcgcgcagagagggagtggccaactccatcactaggggttcctgcggccgcacgcgtctagatcccatatatggagttccgcgttacataacttacggtaaatggcccgcctggctgaccgcccaacgacccccgcccattgacgtcaataatgacgtatgttcccatagtaacgccaatagggactttccattgacgtcaatgggtggagtatttacggtaaactgcccacttggcagtacatcaagtgtatcatatgccaagtacgccccctattgacgtcaatgacggtaaatggcccgcctggcattatgcccagtacatgaccttatgggactttcctacttggcagtacatctacgtattagtcatcgctattaccatggtgatgcggttttggcagtacatcaatgggcgtggatagcggtttgactcacggggatttccaagtctccaccccattgacgtcaatgggagtttgttttggcaccaaaatcaacgggactttccaaaatgtcgtaacaactccgccccattgacgcaaatgggcggtaggcgtgtacggtgggaggtctatataagcagagctcgtttagtgaaccgtcagatcgcctggagacgcaccggtgccaccatggaagatgccaaaaacattaagaagggcccagcgccattctacccactcgaagacgggaccgccggcgagcagctgcacaaagccatgaagcgctacgccctggtgcccggcaccatcgcctttaccgacgcacatatcgaggtggacattacctacgccgagtacttcgagatgagcgttcggctggcagaagctatgaagcgctatgggctgaatacaaaccatcggatcgtggtgtgcagcgagaatagcttgcagttcttcatgcccgtgttgggtgccctgttcatcggtgtggctgtggccccagctaacgacatctacaacgagcgcgagctgctgaacagcatgggcatcagccagcccaccgtcgtattcgtgagcaagaaagggctgcaaaagatcctcaacgtgcaaaagaagctaccgatcatacaaaagatcatcatcatggatagcaagaccgactaccagggcttccaaagcatgtacaccttcgtgacttcccatttgccacccggcttcaacgagtacgacttcgtgcccgagagcttcgaccgggacaaaaccatcgccctgatcatgaacagtagtggcagtaccggattgcccaagggcgtagccctaccgcaccgcaccgcttgtgtccgattcagtcatgcccgcgaccccatcttcggcaaccagatcatccccgacaccgctatcctcagcgtggtgccatttcaccacggcttcggcatgttcaccacgctgggctacttgatctgcggctttcgggtcgtgctcatgtaccgcttcgaggaggagctattcttgcgcagcttgcaagactataagattcaatctgccctgctggtgcccacactatttagcttcttcgctaagagcactctcatcgacaagtacgacctaagcaacttgcacgagatcgccagcggcggggcgccgctcagcaaggaggtaggtgaggccgtggccaaacgcttccacctaccaggcatccgccagggctacggcctgacagaaacaaccagcgccattctgatcacccccgaaggggacgacaagcctggcgcagtaggcaaggtggtgcccttcttcgaggctaaggtggtggacttggacacaggtaagacactgggtgtgaaccagcgcggcgagctgtgcgtccgtggccccatgatcatgagcggctacgttaacaaccccgaggctacaaacgctctcatcgacaaggacggctggctgcacagcggcgacatcgcctactgggacgaggacgagcacttcttcatcgtggaccggctgaagagcctgatcaaatacaagggctaccaggtagccccagccgaactggagagcatcctgctgcaacaccccaacatcttcgacgccggggtcgccggcctgcccgacgacgatgccggcgagctgcccgccgcagtcgtcgtgctggaacacggtaaaaccatgaccgagaaggagatcgtggactatgtggccagccaggttacaaccgccaagaagctgcgcggtggtgttgtgttcgtggacgaggtgcctaaaggactgaccggcaagttggacgcccgcaagatccgcgagattctcattaaggccaagaagggcggcaagatcgccgtgggctccggagagggcagaggaagtctgctaacatgcggtgacgtcgaggagaatcctggcccaatggagagcgacgagagcggcctgcccgccatggagatcgagtgccgcatcaccggcaccctgaacggcgtggagttcgagctggtgggcggcggagagggcacccccgagcagggccgcatgaccaacaagatgaagagcaccaaaggcgccctgaccttcagcccctacctgctgagccacgtgatgggctacggcttctaccacttcggcacctaccccagcggctacgagaaccccttcctgcacgccatcaacaacggcggctacaccaacacccgcatcgagaagtacgaggacggcggcgtgctgcacgtgagcttcagctaccgctacgaggccggccgcgtgatcggcgacttcaaggtgatgggcaccggcttccccgaggacagcgtgatcttcaccgacaagatcatccgcagcaacgccaccgtggagcacctgcaccccatgggcgataacgatctggatggcagcttcacccgcaccttcagcctgcgcgacggcggctactacagctccgtggtggacagccacatgcacttcaagagcgccatccaccccagcatcctgcagaacgggggccccatgttcgccttccgccgcgtggaggaggatcacagcaacaccgagctgggcatcgtggagtaccagcacgccttcaagaccccggatgcagatgccggtgaagaataagagctcgctgatcagcctcgataagatacattgatgagtttggacaaaccacaactagaatgcagtgaaaaaaatgctttatttgtgaaatttgtgatgctattgctttatttgtaaccattataagctgcaataaacaagttttaattaaggtcgggcaggaagagggcctatttcccatgattccttcatatttgcatatacgatacaaggctgttagagagataattagaattaatttgactgtaaacacaaagatattagtacaaaatacgtgacgtagaaagtaataatttcttgggtagtttgcagttttaaaattatgttttaaaatggactatcatatgcttaccgtaacttgaaagtatttcgatttcttggctttatatatcttgtggaaaggacgaaacaccgggtggatgaaatcagcatgatcgaaatcatgctgatttcatccaccttttttaagcttttttgaattcagctgacgtgcctcggaccgctaggaacccctagtgatggagttggccactccctctctgcgcgctcgctcgctcactgaggccgggcgaccaaaggtcgcccgacgcccgggctttgcccgggcggcctcagtgagcgagcgagcgcgcag

SEQ ID NO: 267 - DNA, 4048 bp, Artificial Sequence
  source: /note="Description of Artificial Sequence: Synthetic polynucleotide"
ctgcgcgctcgctcgctcactgaggccgcccgggcgtcgggcgacctttggtcgcccggcctcagtgagcgagcgagcgcgcagagagggagtggccaactccatcactaggggttcctgcggccgcacgcgtctagatcccatatatggagttccgcgttacataacttacggtaaatggcccgcctggctgaccgcccaacgacccccgcccattgacgtcaataatgacgtatgttcccatagtaacgccaatagggactttccattgacgtcaatgggtggagtatttacggtaaactgcccacttggcagtacatcaagtgtatcatatgccaagtacgccccctattgacgtcaatgacggtaaatggcccgcctggcattatgcccagtacatgaccttatgggactttcctacttggcagtacatctacgtattagtcatcgctattaccatggtgatgcggttttggcagtacatcaatgggcgtggatagcggtttgactcacggggatttccaagtctccaccccattgacgtcaatgggagtttgttttggcaccaaaatcaacgggactttccaaaatgtcgtaacaactccgccccattgacgcaaatgggcggtaggcgtgtacggtgggaggtctatataagcagagctcgtttagtgaaccgtcagatcgcctggagacgcaccggtgccaccatggctgaagcccctcctagaaggcttggactgggacctcctcctggggatgctcctagagctgaactggtggctctgacagccgtgcagtctgaacaaggcgaagctggtggcggcggatctccacgtagacttggactgctgggaagccctcttcctcctggtgctccacttcctggacctggcagtggatctggatctgcctgtggccagagaagctctgccgctcacaagagataccggcggctgcagaactgggtgtacaacgtgctggaaagacccagaggctgggccttcgtgtaccacgtgttcatctttctgctggtgttcagctgcctggtgctgtccgtgctgagcaccatccaagaacatcaagagctggctaacgagtgcctgttaatactggagtttgtgatgattgtggtgttcggcctcgagtacatcgtccgcgtttggagcgccggctgctgctgcagatatagaggttggcaaggcagattccgcttcgccagaaagcccttctgcgtgatcgacttcatcgtgttcgtggccagcgtggccgtgattgctgctggcacacagggcaacatcttcgccacaagcgccctgcggagcatgcggtttctgcagatcctgagaatggtccgaatggacagaagaggcggcacctggaagctgctgggctctgtggtgtacgcccacagcaaagagctgatcaccgcctggtacatcggatttctggtgctgatcttcgcctccttcctggtgtacctggccgagaaggacgccaacagcgactttagcagctacgccgactctctttggtggggcaccatcacactgaccaccatcggctacggcgacaagacccctcacacatggctgggaagagtgctggccgctggatttgctctgctgggcatcagctttttcgccctgcctgccggaatcctcggatctggctttgccctgaaggtgcaagagcagcaccggcagaagcacttcgagaagagaagaatgcctgccgccaacctgattcaggccgcttggagactgtacagcaccgacatgagcagagcctacctgaccgccacgtggtattattacgactcgatcctgcctagcttccgcgaactggccctgctgtttgagcatgtgcagagagccagaaacggcggcctcagacctctggaagttcggagagcacctgtgcctgatggcgccccttctagatatcctccagtggccacctgtcacagacccggcagcacatctttttgccctggcgagtctagccggatgggcatcaaggacagaatcagaatgggcagcagccagcggagaacaggcccttctaaacagcatctggcccctccaaccatgcctacaagccctagctctgagcaagtgggcgaagccacctctcctaccaaggtgcagaagtcctggtccttcaacgaccggaccagattcagagccagcctgagactgaagcccagaacctctgccgaggatgccccttctgaagaggtggccgaagagaagtcctaccagtgcgagctgaccgtggacgacatcatgccagccgtgaaaaccgtgatacggtctatccggatcctgaagttcctggtggccaagcggaagttcaaagagacactgcggccctacgacgtgaaggacgtgatcgagcagtattctgccggccacctggacatgctgggcagaatcaagagcctgcagaccagagtggaccagatcgttggaagaggcccaggcgacagaaaggccagagagaagggcgataagggcccatctgatgccgaggttgtcgacgagatatcaatgatgggcagagtggtcaaggtggaaaaacaggtgcagagcatcgagcacaagctggacctgctgctgggattctacagccggtgtctgagaagcggcacatctgcatctctgggcgctgtgcaggtcccactgttcgaccctgatatcaccagcgactatcacagccccgtggaccacgaggacatctccgtttctgctcagaccctgagcatcagcagatccgtgtccaccaacatggacggatcccgggctgactacaaagaccatgacggtgattataaagatcatgacatcgactacaaggatgacgatgacaagggctccggagagggcagaggaagtctgctaacatgcggtgacgtcgaggagaatcctggcccaatggtgagcaagggcgaggcagtgatcaaggagttcatgcggttcaaggtgcacatggagggctccatgaacggccacgagttcgagatcgagggcgagggcgagggccgcccctacgagggcacccagaccgccaagctgaaggtgaccaagggtggccccctgcccttctcctgggacatcctgtcccctcagttcatgtacggctccagggccttcatcaagcaccccgccgacatccccgactactataagcagtccttccccgagggcttcaagtgggagcgcgtgatgaacttcgaggacggcggcgccgtgaccgtgacccaggacacctccctggaggacggcaccctgatctacaaggtgaagctccgcggcaccaacttccctcctgacggccccgtaatgcagaagaagacaatgggctgggaagcgtccaccgagcggttgtaccccgaggacggcgtgctgaagggcgacattaagatggccctgcgcctgaaggacggcggccgctacctggcggacttcaagaccacctacaaggccaagaagcccgtgcagatgcccggcgcctacaacgtcgaccgcaagttggacatcacctcccacaacgaggactacaccgtggtggaacagtacgaacgctccgagggccgccactccaccggcggcatggacgagctgtacaagtaataagagctcgctgatcagcctcgactgtgccttctagttgccagccatctgttgtttgcccctcccccgtgccttccttgaccctggaaggtgccactcccactgtcctttcctaataaaatgaggaaattgcatcgcattgtctgagtaggtgtcattctattctggggggtggggtggggcaggacagcaagggggaggattgggaagacaatagcaggcatgctggggatgcggtgggctctatggaagcttgaattcagctgacgtgcctcggaccgctaggaacccctagtgatggagttggccactccctctctgcgcgctcgctcgctcactgaggccgggcgaccaaaggtcgcccgacgcccgggctttgcccgggcggcctcagtgagcgagcgagcgcgcag

SEQ ID NO: 268 - DNA, 4048 bp, Artificial Sequence
  source: /note="Description of Artificial Sequence: Synthetic polynucleotide"
ctgcgcgctcgctcgctcactgaggccgcccgggcgtcgggcgacctttggtcgcccggcctcagtgagcgagcgagcgcgcagagagggagtggccaactccatcactaggggttcctgcggccgcacgcgtctagatcccatatatggagttccgcgttacataacttacggtaaatggcccgcctggctgaccgcccaacgacccccgcccattgacgtcaataatgacgtatgttcccatagtaacgccaatagggactttccattgacgtcaatgggtggagtatttacggtaaactgcccacttggcagtacatcaagtgtatcatatgccaagtacgccccctattgacgtcaatgacggtaaatggcccgcctggcattatgcccagtacatgaccttatgggactttcctacttggcagtacatctacgtattagtcatcgctattaccatggtgatgcggttttggcagtacatcaatgggcgtggatagcggtttgactcacggggatttccaagtctccaccccattgacgtcaatgggagtttgttttggcaccaaaatcaacgggactttccaaaatgtcgtaacaactccgccccattgacgcaaatgggcggtaggcgtgtacggtgggaggtctatataagcagagctcgtttagtgaaccgtcagatcgcctggagacgcaccggtgccaccatggctgaagcccctcctagaaggcttggactgggacctcctcctggggatgctcctagagctgaactggtggctctgacagccgtgcagtctgaacaaggcgaagctggtggcggcggatctccacgtagacttggactgctgggaagccctcttcctcctggtgctccacttcctggacctggcagtggatctggatctgcctgtggccagagaagctctgccgctcacaagagataccggcggctgcagaactgggtgtacaacgtgctggaaagacccagaggctgggccttcgtgtaccacgtgttcatctttctgctggtgttcagctgcctggtgctgtccgtgctgagcaccatccaagaacatcaagagctggctaacgagtgcctgttaatactggagtttgtgatgattgtggtgttcggcctcgagtacatcgtccgcgtttggagcgccggctgctgctgcagatatagaggttggcaaggcagattccgcttcgccagaaagcccttctgcgtgatcgacttcatcgtgttcgtggccagcgtggccgtgattgctgctggcacacagggcaacatcttcgccacaagcgccctgcggagcatgcggtttctgcagatcctgagaatggtccgaatggacagaagaggcggcacctggaagctgctgggctctgtggtgtacgcccacagcaaagagctgatcaccgcctggtacatcggatttctggtgctgatcttcgcctccttcctggtgtacctggccgagaaggacgccaacagcgactttagcagctacgccgactctctttggtggggcaccatcacactgaccaccatcggctacggcgacaagacccctcacacatggctgggaagagtgctggccgctggatttgctctgctgggcatcagctttttcgccctgcctgccggaatcctcggatctggctttgccctgaaggtgcaagagcagcatagacaaaagcattttgaaaagagaagaatgcctgccgccaacctgattcaggccgcttggagactgtacagcaccgacatgagcagagcctacctgaccgccacgtggtattattacgattcgatcctgcctagcttccgcgaactggccctgctgtttgagcatgtgcagagagccagaaacggcggcctcagacctctggaagttcggagagcacctgtgcctgatggcgccccttctagatatcctccagtggccacctgtcacagacccggcagcacatctttttgccctggcgagtctagccggatgggcatcaaggacagaatcagaatgggcagcagccagcggagaacaggcccttctaaacagcatctggcccctccaaccatgcctacaagccctagctctgagcaagtgggcgaagccacctctcctaccaaggtgcagaagtcctggtccttcaacgaccggaccagatttagagccagcctccggctgaagcccagaacctctgccgaggatgccccttctgaagaggtggccgaagagaagtcctaccagtgcgagctgaccgtggacgacatcatgccagccgtgaaaaccgtgataaggtctatacgcatcctgaagttcctggtggccaagcggaagttcaaagagacactgcggccctacgacgtgaaggacgtgatcgagcagtattctgccggccacctggacatgctgggcagaatcaagagcctgcagaccagagtggaccagatcgttggaagaggcccaggcgacagaaaggccagagagaagggcgataagggcccatctgatgccgaggttgtcgacgagatatcaatgatgggcagagtcgtgaaagtcgaaaaacaggtgcagagcatcgagcacaagctggacctgctgctgggattctacagccggtgtctgagaagcggcacatctgcatctctgggcgctgtgcaggtcccactgttcgatcctgatattacgagcgattatcacagccccgtggaccacgaggacatctccgtttctgctcagaccctgagcatcagcagatccgtgtccaccaacatggacggatcccgggctgactacaaagaccatgacggtgattataaagatcatgacatcgactacaaggatgacgatgacaagggctccggagagggcagaggaagtctgctaacatgcggtgacgtcgaggagaatcctggcccaatggtgagcaagggcgaggcagtgatcaaggagttcatgcggttcaaggtgcacatggagggctccatgaacggccacgagttcgagatcgagggcgagggcgagggccgcccctacgagggcacccagaccgccaagctgaaggtgaccaagggtggccccctgcccttctcctgggacatcctgtcccctcagttcatgtacggctccagggccttcatcaagcaccccgccgacatccccgactactataagcagtccttccccgagggcttcaagtgggagcgcgtgatgaacttcgaggacggcggcgccgtgaccgtgacccaggacacctccctggaggacggcaccctgatctacaaggtgaagctccgcggcaccaacttccctcctgacggccccgtaatgcagaagaagacaatgggctgggaagcgtccaccgagcggttgtaccccgaggacggcgtgctgaagggcgacattaagatggccctgcgcctgaaggacggcggccgctacctggcggacttcaagaccacctacaaggccaagaagcccgtgcagatgcccggcgcctacaacgtcgaccgcaagttggacatcacctcccacaacgaggactacaccgtggtggaacagtacgaacgctccgagggccgccactccaccggcggcatggacgagctgtacaagtaataagagctcgctgatcagcctcgactgtgccttctagttgccagccatctgttgtttgcccctcccccgtgccttccttgaccctggaaggtgccactcccactgtcctttcctaataaaatgaggaaattgcatcgcattgtctgagtaggtgtcattctattctggggggtggggtggggcaggacagcaagggggaggattgggaagacaatagcaggcatgctggggatgcggtgggctctatggaagcttgaattcagctgacgtgcctcggaccgctaggaacccctagtgatggagttggccactccctctctgcgcgctcgctcgctcactgaggccgggcgaccaaaggtcgcccgacgcccgggctttgcccgggcggcctcagtgagcgagcgagcgcgcag

SEQ ID NO: 269 - DNA, 3625 bp, Artificial Sequence
  source: /note="Description of Artificial Sequence: Synthetic polynucleotide"
ctgcgcgctcgctcgctcactgaggccgcccgggcgtcgggcgacctttggtcgcccggcctcagtgagcgagcgagcgcgcagagagggagtggccaactccatcactaggggttcctgcggccgcacgcgtctagatcccatatatggagttccgcgttacataacttacggtaaatggcccgcctggctgaccgcccaacgacccccgcccattgacgtcaataatgacgtatgttcccatagtaacgccaatagggactttccattgacgtcaatgggtggagtatttacggtaaactgcccacttggcagtacatcaagtgtatcatatgccaagtacgccccctattgacgtcaatgacggtaaatggcccgcctggcattatgcccagtacatgaccttatgggactttcctacttggcagtacatctacgtattagtcatcgctattaccatggtgatgcggttttggcagtacatcaatgggcgtggatagcggtttgactcacggggatttccaagtctccaccccattgacgtcaatgggagtttgttttggcaccaaaatcaacgggactttccaaaatgtcgtaacaactccgccccattgacgcaaatgggcggtaggcgtgtacggtgggaggtctatataagcagagctcgtttagtgaaccgtcgtttagtgaaccgtcagatcgcctggagacgcaccggtgccaccatggctgaagcccctcctagaaggcttggactgggacctcctcctggggatgctcctagagctgaactggtggctctgacagccgtgcagtctgaacaaggcgaagctggtggcggcggatctccacgtagacttggactgctgggaagccctcttcctcctggtgctccacttcctggacctggcagtggatctggatctgcctgtggccagagaagctctgccgctcacaagagataccggcggctgcagaactgggtgtacaacgtgctggaaagacccagaggctgggccttcgtgtaccacgtgttcatctttctgctggtgttcagctgcctggtgctgtccgtgctgagcaccatccaagaacatcaagagctggctaacgagtgcctgttaatactggagtttgtgatgattgtggtgttcggcctcgagtacatcgtccgcgtttggagcgccggctgctgctgcagatatagaggttggcaaggcagattccgcttcgccagaaagcccttctgcgtgatcgacttcatcgtgttcgtggccagcgtggccgtgattgctgctggcacacagggcaacatcttcgccacaagcgccctgcggagcatgcggtttctgcagatcctgagaatggtccgaatggacagaagaggcggcacctggaagctgctgggctctgtggtgtacgcccacagcaaagagctgatcaccgcctggtacatcggatttctggtgctgatcttcgcctccttcctggtgtacctggccgagaaggacgccaacagcgactttagcagctacgccgactctctttggtggggcaccatcacactgaccaccatcggctacggcgacaagacccctcacacatggctgggaagagtgctggccgctggatttgctctgctgggcatcagctttttcgccctgcctgccggaatcctcggatctggctttgccctgaaggtgcaagagcagcaccggcagaagcacttcgagaagagaagaatgcctgccgccaacctgattcaggccgcttggagactgtacagcaccgacatgagcagagcctacctgaccgccacgtggtattattacgactcgatcctgcctagcttccgcgaactggccctgctgtttgagcatgtgcagagagccagaaacggcggcctcagacctctggaagttcggagagcacctgtgcctgatggcgccccttctagatatcctccagtggccacctgtcacagacccggcagcacatctttttgccctggcgagtctagccggatgggcatcaaggacagaatcagaatgggcagcagccagcggagaacaggcccttctaaacagcatctggcccctccaaccatgcctacaagccctagctctgagcaagtgggcgaagccacctctcctaccaaggtgcagaagtcctggtccttcaacgaccggaccagattcagagccagcctgagactgaagcccagaacctctgccgaggatgccccttctgaagaggtggccgaagagaagtcctaccagtgcgagctgaccgtggacgacatcatgccagccgtgaaaaccgtgatacggtctatccggatcctgaagttcctggtggccaagcggaagttcaaagagacactgcggccctacgacgtgaaggacgtgatcgagcagtattctgccggccacctggacatgctgggcagaatcaagagcctgcagaccagagtggaccagatcgttggaagaggcccaggcgacagaaaggccagagagaagggcgataagggcccatctgatgccgaggttgtcgacgagatatcaatgatgggcagagtggtcaaggtggaaaaacaggtgcagagcatcgagcacaagctggacctgctgctgggattctacagccggtgtctgagaagcggcacatctgcatctctgggcgctgtgcaggtcccactgttcgaccctgatatcaccagcgactatcacagccccgtggaccacgaggacatctccgtttctgctcagaccctgagcatcagcagatccgtgtccaccaacatggactaataagagctcgctgatcagcctcgactgtgccttctagttgccagccatctgttgtttgcccctcccccgtgccttccttgaccctggaaggtgccactcccactgtcctttcctaataaaatgaggaaattgcatcgcattgtctgagtaggtgtcattctattctggggggtggggtggggcaggacagcaagggggaggattgggaagacaatagcaggcatgctggggatgcggtgggctctatggttaattaaggtcgggcaggaagagggcctatttcccatgattccttcatatttgcatatacgatacaaggctgttagagagataattagaattaatttgactgtaaacacaaagatattagtacaaaatacgtgacgtagaaagtaataatttcttgggtagtttgcagttttaaaattatgttttaaaatggactatcatatgcttaccgtaacttgaaagtatttcgatttcttggctttatatatcttgtggaaaggacgaaacaccgaggagcaccaggaacttgccagtttaagtactctgtgctggaaacagcacagaatctacttaaacaaggcaaaatgccgtgtttatctcgtcaacttgttggcgagattttttctaaagcttgaattcaagcttgaattcagctgacgtgcctcggaccgctaggaacccctagtgatggagttggccactccctctctgcgcgctcgctcgctcactgaggccgggcgaccaaaggtcgcccgacgcccgggctttgcccgggcggcctcagtgagcgagcgagcgcgcag

SEQ ID NO: 270 - DNA, 3625 bp, Artificial Sequence
  source: /note="Description of Artificial Sequence: Synthetic polynucleotide"
ctgcgcgctcgctcgctcactgaggccgcccgggcgtcgggcgacctttggtcgcccggcctcagtgagcgagcgagcgcgcagagagggagtggccaactccatcactaggggttcctgcggccgcacgcgtctagatcccatatatggagttccgcgttacataacttacggtaaatggcccgcctggctgaccgcccaacgacccccgcccattgacgtcaataatgacgtatgttcccatagtaacgccaatagggactttccattgacgtcaatgggtggagtatttacggtaaactgcccacttggcagtacatcaagtgtatcatatgccaagtacgccccctattgacgtcaatgacggtaaatggcccgcctggcattatgcccagtacatgaccttatgggactttcctacttggcagtacatctacgtattagtcatcgctattaccatggtgatgcggttttggcagtacatcaatgggcgtggatagcggtttgactcacggggatttccaagtctccaccccattgacgtcaatgggagtttgttttggcaccaaaatcaacgggactttccaaaatgtcgtaacaactccgccccattgacgcaaatgggcggtaggcgtgtacggtgggaggtctatataagcagagctcgtttagtgaaccgtcgtttagtgaaccgtcagatcgcctggagacgcaccggtgccaccatggctgaagcccctcctagaaggcttggactgggacctcctcctggggatgctcctagagctgaactggtggctctgacagccgtgcagtctgaacaaggcgaagctggtggcggcggatctccacgtagacttggactgctgggaagccctcttcctcctggtgctccacttcctggacctggcagtggatctggatctgcctgtggccagagaagctctgccgctcacaagagataccggcggctgcagaactgggtgtacaacgtgctggaaagacccagaggctgggccttcgtgtaccacgtgttcatctttctgctggtgttcagctgcctggtgctgtccgtgctgagcaccatccaagaacatcaagagctggctaacgagtgcctgttaatactggagtttgtgatgattgtggtgttcggcctcgagtacatcgtccgcgtttggagcgccggctgctgctgcagatatagaggttggcaaggcagattccgcttcgccagaaagcccttctgcgtgatcgacttcatcgtgttcgtggccagcgtggccgtgattgctgctggcacacagggcaacatcttcgccacaagcgccctgcggagcatgcggtttctgcagatcctgagaatggtccgaatggacagaagaggcggcacctggaagctgctgggctctgtggtgtacgcccacagcaaagagctgatcaccgcctggtacatcggatttctggtgctgatcttcgcctccttcctggtgtacctggccgagaaggacgccaacagcgactttagcagctacgccgactctctttggtggggcaccatcacactgaccaccatcggctacggcgacaagacccctcacacatggctgggaagagtgctggccgctggatttgctctgctgggcatcagctttttcgccctgcctgccggaatcctcggatctggctttgccctgaaggtgcaagagcagcaccggcagaagcacttcgagaagagaagaatgcctgccgccaacctgattcaggccgcttggagactgtacagcaccgacatgagcagagcctacctgaccgccacgtggtattattacgactcgatcctgcctagcttccgcgaactggccctgctgtttgagcatgtgcagagagccagaaacggcggcctcagacctctggaagttcggagagcacctgtgcctgatggcgccccttctagatatcctccagtggccacctgtcacagacccggcagcacatctttttgccctggcgagtctagccggatgggcatcaaggacagaatcagaatgggcagcagccagcggagaacaggcccttctaaacagcatctggcccctccaaccatgcctacaagccctagctctgagcaagtgggcgaagccacctctcctaccaaggtgcagaagtcctggtccttcaacgaccggaccagattcagagccagcctgagactgaagcccagaacctctgccgaggatgccccttctgaagaggtggccgaagagaagtcctaccagtgcgagctgaccgtggacgacatcatgccagccgtgaaaaccgtgatacggtctatccggatcctgaagttcctggtggccaagcggaagttcaaagagacactgcggccctacgacgtgaaggacgtgatcgagcagtattctgccggccacctggacatgctgggcagaatcaagagcctgcagaccagagtggaccagatcgttggaagaggcccaggcgacagaaaggccagagagaagggcgataagggcccatctgatgccgaggttgtcgacgagatatcaatgatgggcagagtggtcaaggtggaaaaacaggtgcagagcatcgagcacaagctggacctgctgctgggattctacagccggtgtctgagaagcggcacatctgcatctctgggcgctgtgcaggtcccactgttcgaccctgatatcaccagcgactatcacagccccgtggaccacgaggacatctccgtttctgctcagaccctgagcatcagcagatccgtgtccaccaacatggactaataagagctcgctgatcagcctcgactgtgccttctagttgccagccatctgttgtttgcccctcccccgtgccttccttgaccctggaaggtgccactcccactgtcctttcctaataaaatgaggaaattgcatcgcattgtctgagtaggtgtcattctattctggggggtggggtggggcaggacagcaagggggaggattgggaagacaatagcaggcatgctggggatgcggtgggctctatggttaattaaggtcgggcaggaagagggcctatttcccatgattccttcatatttgcatatacgatacaaggctgttagagagataattagaattaatttgactgtaaacacaaagatattagtacaaaatacgtgacgtagaaagtaataatttcttgggtagtttgcagttttaaaattatgttttaaaatggactatcatatgcttaccgtaacttgaaagtatttcgatttcttggctttatatatcttgtggaaaggacgaaacaccgaagccgaaaaccacgatcatcgtttaagtactctgtgctggaaacagcacagaatctacttaaacaaggcaaaatgccgtgtttatctcgtcaacttgttggcgagattttttctaaagcttgaattcaagcttgaattcagctgacgtgcctcggaccgctaggaacccctagtgatggagttggccactccctctctgcgcgctcgctcgctcactgaggccgggcgaccaaaggtcgcccgacgcccgggctttgcccgggcggcctcagtgagcgagcgagcgcgcag

SEQ ID NO: 271 - DNA, 3625 bp, Artificial Sequence
  source: /note="Description of Artificial Sequence: Synthetic polynucleotide"
ctgcgcgctcgctcgctcactgaggccgcccgggcgtcgggcgacctttggtcgcccggcctcagtgagcgagcgagcgcgcagagagggagtggccaactccatcactaggggttcctgcggccgcacgcgtctagatcccatatatggagttccgcgttacataacttacggtaaatggcccgcctggctgaccgcccaacgacccccgcccattgacgtcaataatgacgtatgttcccatagtaacgccaatagggactttccattgacgtcaatgggtggagtatttacggtaaactgcccacttggcagtacatcaagtgtatcatatgccaagtacgccccctattgacgtcaatgacggtaaatggcccgcctggcattatgcccagtacatgaccttatgggactttcctacttggcagtacatctacgtattagtcatcgctattaccatggtgatgcggttttggcagtacatcaatgggcgtggatagcggtttgactcacggggatttccaagtctccaccccattgacgtcaatgggagtttgttttggcaccaaaatcaacgggactttccaaaatgtcgtaacaactccgccccattgacgcaaatgggcggtaggcgtgtacggtgggaggtctatataagcagagctcgtttagtgaaccgtcgtttagtgaaccgtcagatcgcctggagacgcaccggtgccaccatggctgaagcccctcctagaaggcttggactgggacctcctcctggggatgctcctagagctgaactggtggctctgacagccgtgcagtctgaacaaggcgaagctggtggcggcggatctccacgtagacttggactgctgggaagccctcttcctcctggtgctccacttcctggacctggcagtggatctggatctgcctgtggccagagaagctctgccgctcacaagagataccggcggctgcagaactgggtgtacaacgtgctggaaagacccagaggctgggccttcgtgtaccacgtgttcatctttctgctggtgttcagctgcctggtgctgtccgtgctgagcaccatccaagaacatcaagagctggctaacgagtgcctgttaatactggagtttgtgatgattgtggtgttcggcctcgagtacatcgtccgcgtttggagcgccggctgctgctgcagatatagaggttggcaaggcagattccgcttcgccagaaagcccttctgcgtgatcgacttcatcgtgttcgtggccagcgtggccgtgattgctgctggcacacagggcaacatcttcgccacaagcgccctgcggagcatgcggtttctgcagatcctgagaatggtccgaatggacagaagaggcggcacctggaagctgctgggctctgtggtgtacgcccacagcaaagagctgatcaccgcctggtacatcggatttctggtgctgatcttcgcctccttcctggtgtacctggccgagaaggacgccaacagcgactttagcagctacgccgactctctttggtggggcaccatcacactgaccaccatcggctacggcgacaagacccctcacacatggctgggaagagtgctggccgctggatttgctctgctgggcatcagctttttcgccctgcctgccggaatcctcggatctggctttgccctgaaggtgcaagagcagcaccggcagaagcacttcgagaagagaagaatgcctgccgccaacctgattcaggccgcttggagactgtacagcaccgacatgagcagagcctacctgaccgccacgtggtattattacgactcgatcctgcctagcttccgcgaactggccctgctgtttgagcatgtgcagagagccagaaacggcggcctcagacctctggaagttcggagagcacctgtgcctgatggcgccccttctagatatcctccagtggccacctgtcacagacccggcagcacatctttttgccctggcgagtctagccggatgggcatcaaggacagaatcagaatgggcagcagccagcggagaacaggcccttctaaacagcatctggcccctccaaccatgcctacaagccctagctctgagcaagtgggcgaagccacctctcctaccaaggtgcagaagtcctggtccttcaacgaccggaccagattcagagccagcctgagactgaagcccagaacctctgccgaggatgccccttctgaagaggtggccgaagagaagtcctaccagtgcgagctgaccgtggacgacatcatgccagccgtgaaaaccgtgatacggtctatccggatcctgaagttcctggtggccaagcggaagttcaaagagacactgcggccctacgacgtgaaggacgtgatcgagcagtattctgccggccacctggacatgctgggcagaatcaagagcctgcagaccagagtggaccagatcgttggaagaggcccaggcgacagaaaggccagagagaagggcgataagggcccatctgatgccgaggttgtcgacgagatatcaatgatgggcagagtggtcaaggtggaaaaacaggtgcagagcatcgagcacaagctggacctgctgctgggattctacagccggtgtctgagaagcggcacatctgcatctctgggcgctgtgcaggtcccactgttcgaccctgatatcaccagcgactatcacagccccgtggaccacgaggacatctccgtttctgctcagaccctgagcatcagcagatccgtgtccaccaacatggactaataagagctcgctgatcagcctcgactgtgccttctagttgccagccatctgttgtttgcccctcccccgtgccttccttgaccctggaaggtgccactcccactgtcctttcctaataaaatgaggaaattgcatcgcattgtctgagtaggtgtcattctattctggggggtggggtggggcaggacagcaagggggaggattgggaagacaatagcaggcatgctggggatgcggtgggctctatggttaattaaggtcgggcaggaagagggcctatttcccatgattccttcatatttgcatatacgatacaaggctgttagagagataattagaattaatttgactgtaaacacaaagatattagtacaaaatacgtgacgtagaaagtaataatttcttgggtagtttgcagttttaaaattatgttttaaaatggactatcatatgcttaccgtaacttgaaagtatttcgatttcttggctttatatatcttgtggaaaggacgaaacaccgaagccaaagaccacaatcatcgtttaagtactctgtgctggaaacagcacagaatctacttaaacaaggcaaaatgccgtgtttatctcgtcaacttgttggcgagattttttctaaagcttgaattcaagcttgaattcagctgacgtgcctcggaccgctaggaacccctagtgatggagttggccactccctctctgcgcgctcgctcgctcactgaggccgggcgaccaaaggtcgcccgacgcccgggctttgcccgggcggcctcagtgagcgagcgagcgcgcag

SEQ ID NO: 272 - DNA, 5994 bp, Artificial Sequence
  source: /note="Description of Artificial Sequence: Synthetic polynucleotide"
cctgcaggcagctgcgcgctcgctcgctcactgaggccgcccgggcgtcgggcgacctttggtcgcccggcctcagtgagcgagcgagcgcgcagagagggagtggccaactccatcactaggggttcctgcggccgcacgcgtctagatcccatatatggagttccgcgttacataacttacggtaaatggcccgcctggctgaccgcccaacgacccccgcccattgacgtcaataatgacgtatgttcccatagtaacgccaatagggactttccattgacgtcaatgggtggagtatttacggtaaactgcccacttggcagtacatcaagtgtatcatatgccaagtacgccccctattgacgtcaatgacggtaaatggcccgcctggcattatgcccagtacatgaccttatgggactttcctacttggcagtacatctacgtattagtcatcgctattaccatggtgatgcggttttggcagtacatcaatgggcgtggatagcggtttgactcacggggatttccaagtctccaccccattgacgtcaatgggagtttgttttggcaccaaaatcaacgggactttccaaaatgtcgtaacaactccgccccattgacgcaaatgggcggtaggcgtgtacggtgggaggtctatataagcagagctcgtttagtgaaccgtcgtttagtgaaccgtcagatcgcctggagacgcaccggtgccaccatggctgaagcccctcctagaaggcttggactgggacctcctcctggggatgctcctagagctgaactggtggctctgacagccgtgcagtctgaacaaggcgaagctggtggcggcggatctccacgtagacttggactgctgggaagccctcttcctcctggtgctccacttcctggacctggcagtggatctggatctgcctgtggccagagaagctctgccgctcacaagagataccggcggctgcagaactgggtgtacaacgtgctggaaagacccagaggctgggccttcgtgtaccacgtgttcatctttctgctggtgttcagctgcctggtgctgtccgtgctgagcaccatccaagaacatcaagagctggctaacgagtgcctgttaatactggagtttgtgatgattgtggtgttcggcctcgagtacatcgtccgcgtttggagcgccggctgctgctgcagatatagaggttggcaaggcagattccgcttcgccagaaagcccttctgcgtgatcgacttcatcgtgttcgtggccagcgtggccgtgattgctgctggcacacagggcaacatcttcgccacaagcgccctgcggagcatgcggtttctgcagatcctgagaatggtccgaatggacagaagaggcggcacctggaagctgctgggctctgtggtgtacgcccacagcaaagagctgatcaccgcctggtacatcggatttctggtgctgatcttcgcctccttcctggtgtacctggccgagaaggacgccaacagcgactttagcagctacgccgactctctttggtggggcaccatcacactgaccaccatcggctacggcgacaagacccctcacacatggctgggaagagtgctggccgctggatttgctctgctgggcatcagctttttcgccctgcctgccggaatcctcggatctggctttgccctgaaggtgcaagagcagcaccggcagaagcacttcgagaagagaagaatgcctgccgccaacctgattcaggccgcttggagactgtacagcaccgacatgagcagagcctacctgaccgccacgtggtattattacgactcgatcctgcctagcttccgcgaactggccctgctgtttgagcatgtgcagagagccagaaacggcggcctcagacctctggaagttcggagagcacctgtgcctgatggcgccccttctagatatcctccagtggccacctgtcacagacccggcagcacatctttttgccctggcgagtctagccggatgggcatcaaggacagaatcagaatgggcagcagccagcggagaacaggcccttctaaacagcatctggcccctccaaccatgcctacaagccctagctctgagcaagtgggcgaagccacctctcctaccaaggtgcagaagtcctggtccttcaacgaccggaccagattcagagccagcctgagactgaagcccagaacctctgccgaggatgccccttctgaagaggtggccgaagagaagtcctaccagtgcgagctgaccgtggacgacatcatgccagccgtgaaaaccgtgatacggtctatccggatcctgaagttcctggtggccaagcggaagttcaaagagacactgcggccctacgacgtgaaggacgtgatcgagcagtattctgccggccacctggacatgctgggcagaatcaagagcctgcagaccagagtggaccagatcgttggaagaggcccaggcgacagaaaggccagagagaagggcgataagggcccatctgatgccgaggttgtcgacgagatatcaatgatgggcagagtggtcaaggtggaaaaacaggtgcagagcatcgagcacaagctggacctgctgctgggattctacagccggtgtctgagaagcggcacatctgcatctctgggcgctgtgcaggtcccactgttcgaccctgatatcaccagcgactatcacagccccgtggaccacgaggacatctccgtttctgctcagaccctgagcatcagcagatccgtgtccaccaacatggactaataagagctcgctgatcagcctcgactgtgccttctagttgccagccatctgttgtttgcccctcccccgtgccttccttgaccctggaaggtgccactcccactgtcctttcctaataaaatgaggaaattgcatcgcattgtctgagtaggtgtcattctattctggggggtggggtggggcaggacagcaagggggaggattgggaagacaatagcaggcatgctggggatgcggtgggctctatggttaattaaggtcgggcaggaagagggcctatttcccatgattccttcatatttgcatatacgatacaaggctgttagagagataattagaattaatttgactgtaaacacaaagatattagtacaaaatacgtgacgtagaaagtaataatttcttgggtagtttgcagttttaaaattatgttttaaaatggactatcatatgcttaccgtaacttgaaagtatttcgatttcttggctttatatatcttgtggaaaggacgaaacaccgaggagcaccaggaacttgccagtttaagtactctgtgctggaaacagcacagaatctacttaaacaaggcaaaatgccgtgtttatctcgtcaacttgttggcgagattttttctaaagcttgaattcaagcttgaattcagctgacgtgcctcggaccgctaggaacccctagtgatggagttggccactccctctctgcgcgctcgctcgctcactgaggccgggcgaccaaaggtcgcccgacgcccgggctttgcccgggcggcctcagtgagcgagcgagcgcgcagctgcctgcaggggcgcctgatgcggtattttctccttacgcatctgtgcggtatttcacaccgcatacgtcaaagcaaccatagtacgcgccctgtagcggcgcattaagcgcggcgggtgtggtggttacgcgcagcgtgaccgctacacttgccagcgccctagcgcccgctcctttcgctttcttcccttcctttctcgccacgttcgccggctttccccgtcaagctctaaatcgggggctccctttagggttccgatttagtgctttacggcacctcgaccccaaaaaacttgatttgggtgatggttcacgtagtgggccatcgccctgatagacggtttttcgccctttgacgttggagtccacgttctttaatagtggactcttgttccaaactggaacaacactcaaccctatctcgggctattcttttgatttataagggattttgccgatttcggcctattggttaaaaaatgagctgatttaacaaaaatttaacgcgaattttaacaaaatattaacgtttacaattttatggtgcactctcagtacaatctgctctgatgccgcatagttaagccagccccgacacccgccaacacccgctgacgcgccctgacgggcttgtctgctcccggcatccgcttacagacaagctgtgaccgtctccgggagctgcatgtgtcagaggttttcaccgtcatcaccgaaacgcgcgagacgaaagggcctcgtgatacgcctatttttataggttaatgtcatgaacaataaaactgtctgcttacataaacagtaatacaaggggtgttatgagccatattcaacgggaaacgtcgaggccgcgattaaattccaacatggatgctgatttatatgggtataaatgggctcgcgataatgtcgggcaatcaggtgcgacaatctatcgcttgtatgggaagcccgatgcgccagagttgtttctgaaacatggcaaaggtagcgttgccaatgatgttacagatgagatggtcagactaaactggctgacggaatttatgcctcttccgaccatcaagcattttatccgtactcctgatgatgcatggttactcaccactgcgatccccggaaaaacagcattccaggtattagaagaatatcctgattcaggtgaaaatattgttgatgcgctggcagtgttcctgcgccggttgcattcgattcctgtttgtaattgtccttttaacagcgatcgcgtatttcgtctcgctcaggcgcaatcacgaatgaataacggtttggttgatgcgagtgattttgatgacgagcgtaatggctggcctgttgaacaagtctggaaagaaatgcataaacttttgccattctcaccggattcagtcgtcactcatggtgatttctcacttgataaccttatttttgacgaggggaaattaataggttgtattgatgttggacgagtcggaatcgcagaccgataccaggatcttgccatcctatggaactgcctcggtgagttttctccttcattacagaaacggctttttcaaaaatatggtattgataatcctgatatgaataaattgcagtttcatttgatgctcgatgagtttttctaatctcatgaccaaaatcccttaacgtgagttttcgttccactgagcgtcagaccccgtagaaaagatcaaaggatcttcttgagatcctttttttctgcgcgtaatctgctgcttgcaaacaaaaaaaccaccgctaccagcggtggtttgtttgccggatcaagagctaccaactctttttccgaaggtaactggcttcagcagagcgcagataccaaatactgtccttctagtgtagccgtagttaggccaccacttcaagaactctgtagcaccgcctacatacctcgctctgctaatcctgttaccagtggctgctgccagtggcgataagtcgtgtcttaccgggttggactcaagacgatagttaccggataaggcgcagcggtcgggctgaacggggggttcgtgcacacagcccagcttggagcgaacgacctacaccgaactgagatacctacagcgtgagctatgagaaagcgccacgcttcccgaagggagaaaggcggacaggtatccggtaagcggcagggtcggaacaggagagcgcacgagggagcttccagggggaaacgcctggtatctttatagtcctgtcgggtttcgccacctctgacttgagcgtcgatttttgtgatgctcgtcaggggggcggagcctatggaaaaacgccagcaacgcggcctttttacggttcctggccttttgctggccttttgctcacatgt

SEQ ID NO: 273 - DNA, 5994 bp, Artificial Sequence
  source: /note="Description of Artificial Sequence: Synthetic polynucleotide"
cctgcaggcagctgcgcgctcgctcgctcactgaggccgcccgggcgtcgggcgacctttggtcgcccggcctcagtgagcgagcgagcgcgcagagagggagtggccaactccatcactaggggttcctgcggccgcacgcgtctagatcccatatatggagttccgcgttacataacttacggtaaatggcccgcctggctgaccgcccaacgacccccgcccattgacgtcaataatgacgtatgttcccatagtaacgccaatagggactttccattgacgtcaatgggtggagtatttacggtaaactgcccacttggcagtacatcaagtgtatcatatgccaagtacgccccctattgacgtcaatgacggtaaatggcccgcctggcattatgcccagtacatgaccttatgggactttcctacttggcagtacatctacgtattagtcatcgctattaccatggtgatgcggttttggcagtacatcaatgggcgtggatagcggtttgactcacggggatttccaagtctccaccccattgacgtcaatgggagtttgttttggcaccaaaatcaacgggactttccaaaatgtcgtaacaactccgccccattgacgcaaatgggcggtaggcgtgtacggtgggaggtctatataagcagagctcgtttagtgaaccgtcgtttagtgaaccgtcagatcgcctggagacgcaccggtgccaccatggctgaagcccctcctagaaggcttggactgggacctcctcctggggatgctcctagagctgaactggtggctctgacagccgtgcagtctgaacaaggcgaagctggtggcggcggatctccacgtagacttggactgctgggaagccctcttcctcctggtgctccacttcctggacctggcagtggatctggatctgcctgtggccagagaagctctgccgctcacaagagataccggcggctgcagaactgggtgtacaacgtgctggaaagacccagaggctgggccttcgtgtaccacgtgttcatctttctgctggtgttcagctgcctggtgctgtccgtgctgagcaccatccaagaacatcaagagctggctaacgagtgcctgttaatactggagtttgtgatgattgtggtgttcggcctcgagtacatcgtccgcgtttggagcgccggctgctgctgcagatatagaggttggcaaggcagattccgcttcgccagaaagcccttctgcgtgatcgacttcatcgtgttcgtggccagcgtggccgtgattgctgctggcacacagggcaacatcttcgccacaagcgccctgcggagcatgcggtttctgcagatcctgagaatggtccgaatggacagaagaggcggcacctggaagctgctgggctctgtggtgtacgcccacagcaaagagctgatcaccgcctggtacatcggatttctggtgctgatcttcgcctccttcctggtgtacctggccgagaaggacgccaacagcgactttagcagctacgccgactctctttggtggggcaccatcacactgaccaccatcggctacggcgacaagacccctcacacatggctgggaagagtgctggccgctggatttgctctgctgggcatcagctttttcgccctgcctgccggaatcctcggatctggctttgccctgaaggtgcaagagcagcaccggcagaagcacttcgagaagagaagaatgcctgccgccaacctgattcaggccgcttggagactgtacagcaccgacatgagcagagcctacctgaccgccacgtggtattattacgactcgatcctgcctagcttccgcgaactggccctgctgtttgagcatgtgcagagagccagaaacggcggcctcagacctctggaagttcggagagcacctgtgcctgatggcgccccttctagatatcctccagtggccacctgtcacagacccggcagcacatctttttgccctggcgagtctagccggatgggcatcaaggacagaatcagaatgggcagcagccagcggagaacaggcccttctaaacagcatctggcccctccaaccatgcctacaagccctagctctgagcaagtgggcgaagccacctctcctaccaaggtgcagaagtcctggtccttcaacgaccggaccagattcagagccagcctgagactgaagcccagaacctctgccgaggatgccccttctgaagaggtggccgaagagaagtcctaccagtgcgagctgaccgtggacgacatcatgccagccgtgaaaaccgtgatacggtctatccggatcctgaagttcctggtggccaagcggaagttcaaagagacactgcggccctacgacgtgaaggacgtgatcgagcagtattctgccggccacctggacatgctgggcagaatcaagagcctgcagaccagagtggaccagatcgttggaagaggcccaggcgacagaaaggccagagagaagggcgataagggcccatctgatgccgaggttgtcgacgagatatcaatgatgggcagagtggtcaaggtggaaaaacaggtgcagagcatcgagcacaagctggacctgctgctgggattctacagccggtgtctgagaagcggcacatctgcatctctgggcgctgtgcaggtcccactgttcgaccctgatatcaccagcgactatcacagccccgtggaccacgaggacatctccgtttctgctcagaccctgagcatcagcagatccgtgtccaccaacatggactaataagagctcgctgatcagcctcgactgtgccttctagttgccagccatctgttgtttgcccctcccccgtgccttccttgaccctggaaggtgccactcccactgtcctttcctaataaaatgaggaaattgcatcgcattgtctgagtaggtgtcattctattctggggggtggggtggggcaggacagcaagggggaggattgggaagacaatagcaggcatgctggggatgcggtgggctctatggttaattaaggtcgggcaggaagagggcctatttcccatgattccttcatatttgcatatacgatacaaggctgttagagagataattagaattaatttgactgtaaacacaaagatattagtacaaaatacgtgacgtagaaagtaataatttcttgggtagtttgcagttttaaaattatgttttaaaatggactatcatatgcttaccgtaacttgaaagtatttcgatttcttggctttatatatcttgtggaaaggacgaaacaccgaagccgaaaaccacgatcatcgtttaagtactctgtgctggaaacagcacagaatctacttaaacaaggcaaaatgccgtgtttatctcgtcaacttgttggcgagattttttctaaagcttgaattcaagcttgaattcagctgacgtgcctcggaccgctaggaacccctagtgatggagttggccactccctctctgcgcgctcgctcgctcactgaggccgggcgaccaaaggtcgcccgacgcccgggctttgcccgggcggcctcagtgagcgagcgagcgcgcagctgcctgcaggggcgcctgatgcggtattttctccttacgcatctgtgcggtatttcacaccgcatacgtcaaagcaaccatagtacgcgccctgtagcggcgcattaagcgcggcgggtgtggtggttacgcgcagcgtgaccgctacacttgccagcgccctagcgcccgctcctttcgctttcttcccttcctttctcgccacgttcgccggctttccccgtcaagctctaaatcgggggctccctttagggttccgatttagtgctttacggcacctcgaccccaaaaaacttgatttgggtgatggttcacgtagtgggccatcgccctgatagacggtttttcgccctttgacgttggagtccacgttctttaatagtggactcttgttccaaactggaacaacactcaaccctatctcgggctattcttttgatttataagggattttgccgatttcggcctattggttaaaaaatgagctgatttaacaaaaatttaacgcgaattttaacaaaatattaacgtttacaattttatggtgcactctcagtacaatctgctctgatgccgcatagttaagccagccccgacacccgccaacacccgctgacgcgccctgacgggcttgtctgctcccggcatccgcttacagacaagctgtgaccgtctccgggagctgcatgtgtcagaggttttcaccgtcatcaccgaaacgcgcgagacgaaagggcctcgtgatacgcctatttttataggttaatgtcatgaacaataaaactgtctgcttacataaacagtaatacaaggggtgttatgagccatattcaacgggaaacgtcgaggccgcgattaaattccaacatggatgctgatttatatgggtataaatgggctcgcgataatgtcgggcaatcaggtgcgacaatctatcgcttgtatgggaagcccgatgcgccagagttgtttctgaaacatggcaaaggtagcgttgccaatgatgttacagatgagatggtcagactaaactggctgacggaatttatgcctcttccgaccatcaagcattttatccgtactcctgatgatgcatggttactcaccactgcgatccccggaaaaacagcattccaggtattagaagaatatcctgattcaggtgaaaatattgttgatgcgctggcagtgttcctgcgccggttgcattcgattcctgtttgtaattgtccttttaacagcgatcgcgtatttcgtctcgctcaggcgcaatcacgaatgaataacggtttggttgatgcgagtgattttgatgacgagcgtaatggctggcctgttgaacaagtctggaaagaaatgcataaacttttgccattctcaccggattcagtcgtcactcatggtgatttctcacttgataaccttatttttgacgaggggaaattaataggttgtattgatgttggacgagtcggaatcgcagaccgataccaggatcttgccatcctatggaactgcctcggtgagttttctccttcattacagaaacggctttttcaaaaatatggtattgataatcctgatatgaataaattgcagtttcatttgatgctcgatgagtttttctaatctcatgaccaaaatcccttaacgtgagttttcgttccactgagcgtcagaccccgtagaaaagatcaaaggatcttcttgagatcctttttttctgcgcgtaatctgctgcttgcaaacaaaaaaaccaccgctaccagcggtggtttgtttgccggatcaagagctaccaactctttttccgaaggtaactggcttcagcagagcgcagataccaaatactgtccttctagtgtagccgtagttaggccaccacttcaagaactctgtagcaccgcctacatacctcgctctgctaatcctgttaccagtggctgctgccagtggcgataagtcgtgtcttaccgggttggactcaagacgatagttaccggataaggcgcagcggtcgggctgaacggggggttcgtgcacacagcccagcttggagcgaacgacctacaccgaactgagatacctacagcgtgagctatgagaaagcgccacgcttcccgaagggagaaaggcggacaggtatccggtaagcggcagggtcggaacaggagagcgcacgagggagcttccagggggaaacgcctggtatctttatagtcctgtcgggtttcgccacctctgacttgagcgtcgatttttgtgatgctcgtcaggggggcggagcctatggaaaaacgccagcaacgcggcctttttacggttcctggccttttgctggccttttgctcacatgt

SEQ ID NO: 274 - DNA, 4748 bp, Artificial Sequence
  source: /note="Description of Artificial Sequence: Synthetic polynucleotide"
ctgcgcgctcgctcgctcactgaggccgcccgggcgtcgggcgacctttggtcgcccggcctcagtgagcgagcgagcgcgcagagagggagtggccaactccatcactaggggttcctgcggccgcacgcgtgacattgattattgactagttattaatagtaatcaattacggggtcattagttcatagcccatatatggagttccgcgttacataacttacggtaaatggcccgcctggctgaccgcccaacgacccccgcccattgacgtcaataatgacgtatgttcccatagtaacgccaatagggactttccattgacgtcaatgggtggactatttacggtaaactgcccacttggcagtacatcaagtgtatcatatgccaagtacgccccctattgacgtcaatgacggtaaatggcccgcctggcattatgcccagtacatgaccttatgggactttcctacttggcagtacatctacgtattagtcatcgctattaccatgggtcgaggtgagccccacgttctgcttcactctccccatctcccccccctccccacccccaattttgtatttatttattttttaattattttgtgcagcgatgggggcggggggggggggggcgcgcgccaggcggggcggggcggggcgaggggcggggcggggcgaggcggagaggtgcggcggcagccaatcagagcggcgcgctccgaaagtttccttttatggcgaggcggcggcggcggcggccctataaaaagcgaagcgcgcggcgggcgggagtcgctgcgttgccttcgccccgtgccccgctccgcgccgcctcgcgccgcccgccccggctctgactgaccgcgttactcccacaggtgagcgggcgggacggcccttctcctccgggctgtaattagcgcttggtttaatgacggctcgtttcttttctgtggctgcgtgaaagccttaaagggctccgggagggccctttgtgcgggggggagcggctcggggggtgcgtgcgtgtgtgtgtgcgtggggagcgccgcgtgcggcccgcgctgcccggcggctgtgagcgctgcgggcgcggcgcggggctttgtgcgctccgcgtgtgcgcgaggggagcgcggccgggggcggtgccccgcggtgcgggggggctgcgaggggaacaaaggctgcgtgcggggtgtgtgcgtgggggggtgagcagggggtgtgggcgcggcggtcgggctgtaacccccccctgcacccccctccccgagttgctgagcacggcccggcttcgggtgcggggctccgtgcggggcgtggcgcggggctcgccgtgccgggcggggggtggcggcaggtgggggtgccgggcggggcggggccgcctcgggccggggagggctcgggggaggggcgcggcggcccccggagcgccggcggctgtcgaggcgcggcgagccgcagccattgccttttatggtaatcgtgcgagagggcgcagggacttcctttgtcccaaatctgtgcggagccgaaatctgggaggcgccgccgcaccccctctagcgggcgcggggcgaagcggtgcggcgccggcaggaaggaaatgggcggggagggccttcgtgcgtcgccgcgccgccgtccccttctccctctccagcctcggggctgtccgcggggggacggctgccttcgggggggacggggcagggcggggttcggcttctggcgtgtgaccggcggctctagagcctctgctaaccatgttcatgccttcttctttttcctacagctcctgggcaacgtgctggttattgtgaccggtcgctagccaccatggctgaagcccctcctagaaggcttggactgggacctcctcctggggatgctcctagagctgaactggtggctctgacagccgtgcagtctgaacaaggcgaagctggtggcggcggatctccacgtagacttggactgctgggaagccctcttcctcctggtgctccacttcctggacctggcagtggatctggatctgcctgtggccagagaagctctgccgctcacaagagataccggcggctgcagaactgggtgtacaacgtgctggaaagacccagaggctgggccttcgtgtaccacgtgttcatctttctgctggtgttcagctgcctggtgctgtccgtgctgagcaccatccaagaacatcaagagctggctaacgagtgcctgttaatactggagtttgtgatgattgtggtgttcggcctcgagtacatcgtccgcgtttggagcgccggctgctgctgcagatatagaggttggcaaggcagattccgcttcgccagaaagcccttctgcgtgatcgacttcatcgtgttcgtggccagcgtggccgtgattgctgctggcacacagggcaacatcttcgccacaagcgccctgcggagcatgcggtttctgcagatcctgagaatggtccgaatggacagaagaggcggcacctggaagctgctgggctctgtggtgtacgcccacagcaaagagctgatcaccgcctggtacatcggatttctggtgctgatcttcgcctccttcctggtgtacctggccgagaaggacgccaacagcgactttagcagctacgccgactctctttggtggggcaccatcacactgaccaccatcggctacggcgacaagacccctcacacatggctgggaagagtgctggccgctggatttgctctgctgggcatcagctttttcgccctgcctgccggaatcctcggatctggctttgccctgaaggtgcaagagcagcaccggcagaagcacttcgagaagagaagaatgcctgccgccaacctgattcaggccgcttggagactgtacagcaccgacatgagcagagcctacctgaccgccacgtggtattattacgactcgatcctgcctagcttccgcgaactggccctgctgtttgagcatgtgcagagagccagaaacggcggcctcagacctctggaagttcggagagcacctgtgcctgatggcgccccttctagatatcctccagtggccacctgtcacagacccggcagcacatctttttgccctggcgagtctagccggatgggcatcaaggacagaatcagaatgggcagcagccagcggagaacaggcccttctaaacagcatctggcccctccaaccatgcctacaagccctagctctgagcaagtgggcgaagccacctctcctaccaaggtgcagaagtcctggtccttcaacgaccggaccagattcagagccagcctgagactgaagcccagaacctctgccgaggatgccccttctgaagaggtggccgaagagaagtcctaccagtgcgagctgaccgtggacgacatcatgccagccgtgaaaaccgtgatacggtctatccggatcctgaagttcctggtggccaagcggaagttcaaagagacactgcggccctacgacgtgaaggacgtgatcgagcagtattctgccggccacctggacatgctgggcagaatcaagagcctgcagaccagagtggaccagatcgttggaagaggcccaggcgacagaaaggccagagagaagggcgataagggcccatctgatgccgaggttgtcgacgagatatcaatgatgggcagagtggtcaaggtggaaaaacaggtgcagagcatcgagcacaagctggacctgctgctgggattctacagccggtgtctgagaagcggcacatctgcatctctgggcgctgtgcaggtcccactgttcgaccctgatatcaccagcgactatcacagccccgtggaccacgaggacatctccgtttctgctcagaccctgagcatcagcagatccgtgtccaccaacatggactaataagagctcgctgatcagcctcgactgtgccttctagttgccagccatctgttgtttgcccctcccccgtgccttccttgaccctggaaggtgccactcccactgtcctttcctaataaaatgaggaaattgcatcgcattgtctgagtaggtgtcattctattctggggggtggggtggggcaggacagcaagggggaggattgggaagacaatagcaggcatgctggggatgcggtgggctctatggttaattaaggtcgggcaggaagagggcctatttcccatgattccttcatatttgcatatacgatacaaggctgttagagagataattagaattaatttgactgtaaacacaaagatattagtacaaaatacgtgacgtagaaagtaataatttcttgggtagtttgcagttttaaaattatgttttaaaatggactatcatatgcttaccgtaacttgaaagtatttcgatttcttggctttatatatcttgtggaaaggacgaaacaccgaggagcaccaggaacttgccagtttaagtactctgtgctggaaacagcacagaatctacttaaacaaggcaaaatgccgtgtttatctcgtcaacttgttggcgagattttttctaaagcttgaattcaagcttgaattcagctgacgtgcctcggaccgctaggaacccctagtgatggagttggccactccctctctgcgcgctcgctcgctcactgaggccgggcgaccaaaggtcgcccgacgcccgggctttgcccgggcggcctcagtgagcgagcgagcgcgcag

SEQ ID NO: 275 - DNA, 4748 bp, Artificial Sequence
  source: /note="Description of Artificial Sequence: Synthetic polynucleotide"
ctgcgcgctcgctcgctcactgaggccgcccgggcgtcgggcgacctttggtcgcccggcctcagtgagcgagcgagcgcgcagagagggagtggccaactccatcactaggggttcctgcggccgcacgcgtgacattgattattgactagttattaatagtaatcaattacggggtcattagttcatagcccatatatggagttccgcgttacataacttacggtaaatggcccgcctggctgaccgcccaacgacccccgcccattgacgtcaataatgacgtatgttcccatagtaacgccaatagggactttccattgacgtcaatgggtggactatttacggtaaactgcccacttggcagtacatcaagtgtatcatatgccaagtacgccccctattgacgtcaatgacggtaaatggcccgcctggcattatgcccagtacatgaccttatgggactttcctacttggcagtacatctacgtattagtcatcgctattaccatgggtcgaggtgagccccacgttctgcttcactctccccatctcccccccctccccacccccaattttgtatttatttattttttaattattttgtgcagcgatgggggcggggggggggggggcgcgcgccaggcggggcggggcggggcgaggggcggggcggggcgaggcggagaggtgcggcggcagccaatcagagcggcgcgctccgaaagtttccttttatggcgaggcggcggcggcggcggccctataaaaagcgaagcgcgcggcgggcgggagtcgctgcgttgccttcgccccgtgccccgctccgcgccgcctcgcgccgcccgccccggctctgactgaccgcgttactcccacaggtgagcgggcgggacggcccttctcctccgggctgtaattagcgcttggtttaatgacggctcgtttcttttctgtggctgcgtgaaagccttaaagggctccgggagggccctttgtgcgggggggagcggctcggggggtgcgtgcgtgtgtgtgtgcgtggggagcgccgcgtgcggcccgcgctgcccggcggctgtgagcgctgcgggcgcggcgcggggctttgtgcgctccgcgtgtgcgcgaggggagcgcggccgggggcggtgccccgcggtgcgggggggctgcgaggggaacaaaggctgcgtgcggggtgtgtgcgtgggggggtgagcagggggtgtgggcgcggcggtcgggctgtaacccccccctgcacccccctccccgagttgctgagcacggcccggcttcgggtgcggggctccgtgcggggcgtggcgcggggctcgccgtgccgggcggggggtggcggcaggtgggggtgccgggcggggcggggccgcctcgggccggggagggctcgggggaggggcgcggcggcccccggagcgccggcggctgtcgaggcgcggcgagccgcagccattgccttttatggtaatcgtgcgagagggcgcagggacttcctttgtcccaaatctgtgcggagccgaaatctgggaggcgccgccgcaccccctctagcgggcgcggggcgaagcggtgcggcgccggcaggaaggaaatgggcggggagggccttcgtgcgtcgccgcgccgccgtccccttctccctctccagcctcggggctgtccgcggggggacggctgccttcgggggggacggggcagggcggggttcggcttctggcgtgtgaccggcggctctagagcctctgctaaccatgttcatgccttcttctttttcctacagctcctgggcaacgtgctggttattgtgaccggtcgctagccaccatggctgaagcccctcctagaaggcttggactgggacctcctcctggggatgctcctagagctgaactggtggctctgacagccgtgcagtctgaacaaggcgaagctggtggcggcggatctccacgtagacttggactgctgggaagccctcttcctcctggtgctccacttcctggacctggcagtggatctggatctgcctgtggccagagaagctctgccgctcacaagagataccggcggctgcagaactgggtgtacaacgtgctggaaagacccagaggctgggccttcgtgtaccacgtgttcatctttctgctggtgttcagctgcctggtgctgtccgtgctgagcaccatccaagaacatcaagagctggctaacgagtgcctgttaatactggagtttgtgatgattgtggtgttcggcctcgagtacatcgtccgcgtttggagcgccggctgctgctgcagatatagaggttggcaaggcagattccgcttcgccagaaagcccttctgcgtgatcgacttcatcgtgttcgtggccagcgtggccgtgattgctgctggcacacagggcaacatcttcgccacaagcgccctgcggagcatgcggtttctgcagatcctgagaatggtccgaatggacagaagaggcggcacctggaagctgctgggctctgtggtgtacgcccacagcaaagagctgatcaccgcctggtacatcggatttctggtgctgatcttcgcctccttcctggtgtacctggccgagaaggacgccaacagcgactttagcagctacgccgactctctttggtggggcaccatcacactgaccaccatcggctacggcgacaagacccctcacacatggctgggaagagtgctggccgctggatttgctctgctgggcatcagctttttcgccctgcctgccggaatcctcggatctggctttgccctgaaggtgcaagagcagcaccggcagaagcacttcgagaagagaagaatgcctgccgccaacctgattcaggccgcttggagactgtacagcaccgacatgagcagagcctacctgaccgccacgtggtattattacgactcgatcctgcctagcttccgcgaactggccctgctgtttgagcatgtgcagagagccagaaacggcggcctcagacctctggaagttcggagagcacctgtgcctgatggcgccccttctagatatcctccagtggccacctgtcacagacccggcagcacatctttttgccctggcgagtctagccggatgggcatcaaggacagaatcagaatgggcagcagccagcggagaacaggcccttctaaacagcatctggcccctccaaccatgcctacaagccctagctctgagcaagtgggcgaagccacctctcctaccaaggtgcagaagtcctggtccttcaacgaccggaccagattcagagccagcctgagactgaagcccagaacctctgccgaggatgccccttctgaagaggtggccgaagagaagtcctaccagtgcgagctgaccgtggacgacatcatgccagccgtgaaaaccgtgatacggtctatccggatcctgaagttcctggtggccaagcggaagttcaaagagacactgcggccctacgacgtgaaggacgtgatcgagcagtattctgccggccacctggacatgctgggcagaatcaagagcctgcagaccagagtggaccagatcgttggaagaggcccaggcgacagaaaggccagagagaagggcgataagggcccatctgatgccgaggttgtcgacgagatatcaatgatgggcagagtggtcaaggtggaaaaacaggtgcagagcatcgagcacaagctggacctgctgctgggattctacagccggtgtctgagaagcggcacatctgcatctctgggcgctgtgcaggtcccactgttcgaccctgatatcaccagcgactatcacagccccgtggaccacgaggacatctccgtttctgctcagaccctgagcatcagcagatccgtgtccaccaacatggactaataagagctcgctgatcagcctcgactgtgccttctagttgccagccatctgttgtttgcccctcccccgtgccttccttgaccctggaaggtgccactcccactgtcctttcctaataaaatgaggaaattgcatcgcattgtctgagtaggtgtcattctattctggggggtggggtggggcaggacagcaagggggaggattgggaagacaatagcaggcatgctggggatgcggtgggctctatggttaattaaggtcgggcaggaagagggcctatttcccatgattccttcatatttgcatatacgatacaaggctgttagagagataattagaattaatttgactgtaaacacaaagatattagtacaaaatacgtgacgtagaaagtaataatttcttgggtagtttgcagttttaaaattatgttttaaaatggactatcatatgcttaccgtaacttgaaagtatttcgatttcttggctttatatatcttgtggaaaggacgaaacaccgaagccaaagaccacaatcatcgtttaagtactctgtgctggaaacagcacagaatctacttaaacaaggcaaaatgccgtgtttatctcgtcaacttgttggcgagattttttctaaagcttgaattcaagcttgaattcagctgacgtgcctcggaccgctaggaacccctagtgatggagttggccactccctctctgcgcgctcgctcgctcactgaggccgggcgaccaaaggtcgcccgacgcccgggctttgcccgggcggcctcagtgagcgagcgagcgcgcag

SEQ ID NO: 276 - DNA, 4218 bp, Artificial Sequence
  source: /note="Description of Artificial Sequence: Synthetic polynucleotide"
ctgcgcgctcgctcgctcactgaggccgcccgggcgtcgggcgacctttggtcgcccggcctcagtgagcgagcgagcgcgcagagagggagtggccaactccatcactaggggttcctgcggccgcacgcgtcgttacataacttacggtaaatggcccgcctggctgaccgcccaacgacccccgcccattgacgtcaataatgacgtatgttcccatagtaacgccaatagggactttccattgacgtcaatgggtggagtatttacggtaaactgcccacttggcagtacatcaagtgtatcatatgccaagtacgccccctattgacgtcaatgacggtaaatggcccgcctggcattatgcccagtacatgaccttatgggactttcctacttggcagtacatctacgtattagtcatcgctattaccatggtgatgcggttttggcagtacatcaatgggcgtggatagcggtttgactcacggggatttccaagtctccaccccattgacgtcaatgggagtttgttttggcaccaaaatcaacgggactttccaaaatgtcgtaacaactccgccccattgacgcaaatgggcggtaggcgtgtacggtgggaggtctatataagcagagctcgtttagtgaaccgtcagatcgcctggagacgcaccggtgccaccatggcccctaagaagaagcggaaagtcggcagcggcaagcggaactatatcctgggcctcgccatcggcatcaccagcgttggctacggcatcatcgactacgagacacgggacgtgatcgatgccggcgtgcggctgtttaaagaggccaacgtcgagaacaacgagggccgcagatctaagagaggcgccagacggctgaagcggagaagaaggcacagaatccagagagtgaagaagctgctgttcgactacaacctgctgaccgaccacagcgagctgagcggcatcaatccttacgaggccagagtgaagggcctgagccagaagctgagcgaggaagagtttagcgccgctctgctgcacctggccaagagaagaggcgtgcacaacgtgaacgaggtggaagaggacaccggcaacgagctgtccaccaaagagcagatcagccggaacagcaaggccctggaagagaaatacgtggccgaactgcagctggaacggctgaaaaaggatggcgaagtgcggggcagcatcaatcggttcaagaccagcgactacgtgaaagaagccaaacagctgctgaaggtgcagaaggcctaccaccagctggaccagagcttcatcgacacctacatcgacctgctggaaacccggcggacctactatgaaggacctggcgagggaagccccttcggctggaaggacatcaaagaatggtacgagatgctgatgggccactgcacctactttcccgaggaactgcggagcgtgaagtacgcctacaacgccgacctgtacaacgccctgaacgacctgaacaacctcgtgatcacccgggacgagaacgagaagctggaatattacgagaagttccagatcatcgagaacgtgttcaagcagaagaagaaacccacgctgaagcagatcgccaaagagatcctggtcaacgaggaagatatcaagggctacagagtgaccagcaccggcaagcccgagttcaccaacctgaaggtgtaccacgacatcaaggatatcacagcccggaaagagattattgagaacgccgagctgctggaccaaatcgccaagatcctgaccatctaccagagcagcgaggacatccaagaggaactgaccaatctgaactccgagctgacccaagaagagatcgagcagatctctaatctgaaggggtacaccggcacacacaacctgagcctgaaggccatcaacctgatcctggacgagctgtggcacaccaacgacaaccagattgccatcttcaacaggctgaagctggtgcccaagaaggtggacctgtctcagcagaaagaaatccccaccacactggtggacgacttcattctgagccccgtggtcaagaggagcttcatccagagcatcaaagtgatcaacgccatcatcaagaagtacgggctgcccaacgatatcatcatcgagctggcccgcgagaagaactccaaggacgcccagaaaatgatcaacgagatgcagaagaggaaccgccagaccaacgagcggatcgaggaaatcatccggaccaccggcaaagagaacgccaagtacctgatcgagaagatcaagctgcacgacatgcaagagggcaagtgcctgtacagcctggaagccattcctctggaagatctgctgaacaatcccttcaactatgaggtggaccacatcatccccagaagcgtgtccttcgacaacagcttcaacaacaaggtgctcgtgaagcaagaggaagccagcaagaagggcaacagaaccccattccagtacctgagcagcagcgacagcaagatcagctacgaaaccttcaagaagcacatcctgaatctggccaaaggcaagggcagaatcagcaagaccaagaaagaatacctgctcgaggaacgggacatcaacagattcagcgtgcagaaagacttcatcaatcggaacctggtggacaccagatacgccaccagaggcctgatgaatctgctgcggagctacttcagagtgaacaatctggacgtgaaagtcaagtccatcaacggcggcttcaccagctttctgcggcggaagtggaagttcaagaaagagcggaacaagggctataagcaccacgccgaggacgccctgatcattgccaacgccgatttcatcttcaaagagtggaagaaactggacaaggccaaaaaagtgatggaaaaccagatgttcgaggaaaagcaggccgagagcatgcccgagatcgaaaccgagcaagagtacaaagagattttcatcacgccccaccagatcaagcacattaaggacttcaaggactacaagtacagccaccgcgtggacaagaagcccaatagagagctgattaacgacaccctgtactctacccggaaggacgacaagggcaataccctgatcgtcaacaacctgaacggcctgtacgacaaggacaacgacaagctcaagaagctgatcaacaagagccccgagaaactgctgatgtaccaccacgatcctcagacctaccagaaactgaagctcatcatggaacagtacggcgacgagaagaatcccctgtacaagtactacgaggaaaccgggaactacctgaccaagtactccaaaaaggacaatgggcccgtgatcaagaagattaagtattacggcaacaagctgaatgcccacctggacatcaccgacgactaccccaacagcagaaacaaggtggtcaagctgtccctgaagccttacagattcgacgtgtacctggacaacggcgtgtacaagttcgtgaccgtgaagaacctggacgtcatcaaaaaagaaaactactacgaagtcaacagcaagtgctatgaggaagccaagaaactcaagaaaatcagcaaccaggccgagtttatcgcctccttctacaacaacgatctgatcaagatcaacggggagctgtatagagtgatcggcgtgaacaatgacctgctgaaccggatcgaagtgaacatgatcgacatcacctaccgcgagtacctcgagaacatgaacgataagcggcctccacggatcattaagacaatcgccagcaagacgcagagcattaagaagtacagcacagacatcctgggcaacctgtacgaagtgaagtctaagaagcacccgcagattatcaagaaaggcagcggcgctcccaagaaaaaacggaaggtttaagagctcgctgatcagcctcgataagatacattgatgagtttggacaaaccacaactagaatgcagtgaaaaaaatgctttatttgtgaaatttgtgatgctattgctttatttgtaaccattataagctgcaataaacaagttaagcttgaattcagctgacgtgcctcggaccgctaggaacccctagtgatggagttggccactccctctctgcgcgctcgctcgctcactgaggccgggcgaccaaaggtcgcccgacgcccgggctttgcccgggcggcctcagtgagcgagcgagcgcgcag

SEQ ID NO: 277 - DNA, 3914 bp, Artificial Sequence
  source: /note="Description of Artificial Sequence: Synthetic polynucleotide"
ctgcgcgctcgctcgctcactgaggccgcccgggcgtcgggcgacctttggtcgcccggcctcagtgagcgagcgagcgcgcagagagggagtggccaactccatcactaggggttcctgcggccgcacgcgtgtgatgcggttttggcagtacatcaatgggcgtggatagcggtttgactcacggggatttccaagtctccaccccattgacgtcaatgggagtttgttttggcaccaaaatcaacgggactttccaaaatgtcgtaacaactccgccccattgacgcaaatgggcggtaggcgtgtacggtgggaggtctatataagcagagctcgtttagtgaaccgtcagatcgcctggagacgcaccggtgccaccatggcccctaagaagaagcggaaagtcggcagcggcaagcggaactatatcctgggcctcgccatcggcatcaccagcgttggctacggcatcatcgactacgagacacgggacgtgatcgatgccggcgtgcggctgtttaaagaggccaacgtcgagaacaacgagggccgcagatctaagagaggcgccagacggctgaagcggagaagaaggcacagaatccagagagtgaagaagctgctgttcgactacaacctgctgaccgaccacagcgagctgagcggcatcaatccttacgaggccagagtgaagggcctgagccagaagctgagcgaggaagagtttagcgccgctctgctgcacctggccaagagaagaggcgtgcacaacgtgaacgaggtggaagaggacaccggcaacgagctgtccaccaaagagcagatcagccggaacagcaaggccctggaagagaaatacgtggccgaactgcagctggaacggctgaaaaaggatggcgaagtgcggggcagcatcaatcggttcaagaccagcgactacgtgaaagaagccaaacagctgctgaaggtgcagaaggcctaccaccagctggaccagagcttcatcgacacctacatcgacctgctggaaacccggcggacctactatgaaggacctggcgagggaagccccttcggctggaaggacatcaaagaatggtacgagatgctgatgggccactgcacctactttcccgaggaactgcggagcgtgaagtacgcctacaacgccgacctgtacaacgccctgaacgacctgaacaacctcgtgatcacccgggacgagaacgagaagctggaatattacgagaagttccagatcatcgagaacgtgttcaagcagaagaagaaacccacgctgaagcagatcgccaaagagatcctggtcaacgaggaagatatcaagggctacagagtgaccagcaccggcaagcccgagttcaccaacctgaaggtgtaccacgacatcaaggatatcacagcccggaaagagattattgagaacgccgagctgctggaccaaatcgccaagatcctgaccatctaccagagcagcgaggacatccaagaggaactgaccaatctgaactccgagctgacccaagaagagatcgagcagatctctaatctgaaggggtacaccggcacacacaacctgagcctgaaggccatcaacctgatcctggacgagctgtggcacaccaacgacaaccagattgccatcttcaacaggctgaagctggtgcccaagaaggtggacctgtctcagcagaaagaaatccccaccacactggtggacgacttcattctgagccccgtggtcaagaggagcttcatccagagcatcaaagtgatcaacgccatcatcaagaagtacgggctgcccaacgatatcatcatcgagctggcccgcgagaagaactccaaggacgcccagaaaatgatcaacgagatgcagaagaggaaccgccagaccaacgagcggatcgaggaaatcatccggaccaccggcaaagagaacgccaagtacctgatcgagaagatcaagctgcacgacatgcaagagggcaagtgcctgtacagcctggaagccattcctctggaagatctgctgaacaatcccttcaactatgaggtggaccacatcatccccagaagcgtgtccttcgacaacagcttcaacaacaaggtgctcgtgaagcaagaggaagccagcaagaagggcaacagaaccccattccagtacctgagcagcagcgacagcaagatcagctacgaaaccttcaagaagcacatcctgaatctggccaaaggcaagggcagaatcagcaagaccaagaaagaatacctgctcgaggaacgggacatcaacagattcagcgtgcagaaagacttcatcaatcggaacctggtggacaccagatacgccaccagaggcctgatgaatctgctgcggagctacttcagagtgaacaatctggacgtgaaagtcaagtccatcaacggcggcttcaccagctttctgcggcggaagtggaagttcaagaaagagcggaacaagggctataagcaccacgccgaggacgccctgatcattgccaacgccgatttcatcttcaaagagtggaagaaactggacaaggccaaaaaagtgatggaaaaccagatgttcgaggaaaagcaggccgagagcatgcccgagatcgaaaccgagcaagagtacaaagagattttcatcacgccccaccagatcaagcacattaaggacttcaaggactacaagtacagccaccgcgtggacaagaagcccaatagagagctgattaacgacaccctgtactctacccggaaggacgacaagggcaataccctgatcgtcaacaacctgaacggcctgtacgacaaggacaacgacaagctcaagaagctgatcaacaagagccccgagaaactgctgatgtaccaccacgatcctcagacctaccagaaactgaagctcatcatggaacagtacggcgacgagaagaatcccctgtacaagtactacgaggaaaccgggaactacctgaccaagtactccaaaaaggacaatgggcccgtgatcaagaagattaagtattacggcaacaagctgaatgcccacctggacatcaccgacgactaccccaacagcagaaacaaggtggtcaagctgtccctgaagccttacagattcgacgtgtacctggacaacggcgtgtacaagttcgtgaccgtgaagaacctggacgtcatcaaaaaagaaaactactacgaagtcaacagcaagtgctatgaggaagccaagaaactcaagaaaatcagcaaccaggccgagtttatcgcctccttctacaacaacgatctgatcaagatcaacggggagctgtatagagtgatcggcgtgaacaatgacctgctgaaccggatcgaagtgaacatgatcgacatcacctaccgcgagtacctcgagaacatgaacgataagcggcctccacggatcattaagacaatcgccagcaagacgcagagcattaagaagtacagcacagacatcctgggcaacctgtacgaagtgaagtctaagaagcacccgcagattatcaagaaaggcagcggcgctcccaagaaaaaacggaaggtttaagagctcgctgatcagcctcgataagatacattgatgagtttggacaaaccacaactagaatgcagtgaaaaaaatgctttatttgtgaaatttgtgatgctattgctttatttgtaaccattataagctgcaataaacaagttaagcttgaattcagctgacgtgcctcggaccgctaggaacccctagtgatggagttggccactccctctctgcgcgctcgctcgctcactgaggccgggcgaccaaaggtcgcccgacgcccgggctttgcccgggcggcctcagtgagcgagcgagcgcgcag

SEQ ID NO: 278 - DNA, 4218 bp, Artificial Sequence
  source: /note="Description of Artificial Sequence: Synthetic polynucleotide"
ctgcgcgctcgctcgctcactgaggccgcccgggcgtcgggcgacctttggtcgcccggcctcagtgagcgagcgagcgcgcagagagggagtggccaactccatcactaggggttcctgcggccgcacgcgtcgttacataacttacggtaaatggcccgcctggctgaccgcccaacgacccccgcccattgacgtcaataatgacgtatgttcccatagtaacgccaatagggactttccattgacgtcaatgggtggagtatttacggtaaactgcccacttggcagtacatcaagtgtatcatatgccaagtacgccccctattgacgtcaatgacggtaaatggcccgcctggcattatgcccagtacatgaccttatgggactttcctacttggcagtacatctacgtattagtcatcgctattaccatggtgatgcggttttggcagtacatcaatgggcgtggatagcggtttgactcacggggatttccaagtctccaccccattgacgtcaatgggagtttgttttggcaccaaaatcaacgggactttccaaaatgtcgtaacaactccgccccattgacgcaaatgggcggtaggcgtgtacggtgggaggtctatataagcagagctcgtttagtgaaccgtcagatcgcctggagacgcaccggtgccaccatggcccctaagaagaagcggaaagtcggcagcggcaagcggaactatatcctgggcctcgacatcggcatcaccagcgttggctacggcatcatcgactacgagacacgggacgtgatcgatgccggcgtgcggctgtttaaagaggccaacgtcgagaacaacgagggccgcagatctaagagaggcgccagacggctgaagcggagaagaaggcacagaatccagagagtgaagaagctgctgttcgactacaacctgctgaccgaccacagcgagctgagcggcatcaatccttacgaggccagagtgaagggcctgagccagaagctgagcgaggaagagtttagcgccgctctgctgcacctggccaagagaagaggcgtgcacaacgtgaacgaggtggaagaggacaccggcaacgagctgtccaccaaagagcagatcagccggaacagcaaggccctggaagagaaatacgtggccgaactgcagctggaacggctgaaaaaggatggcgaagtgcggggcagcatcaatcggttcaagaccagcgactacgtgaaagaagccaaacagctgctgaaggtgcagaaggcctaccaccagctggaccagagcttcatcgacacctacatcgacctgctggaaacccggcggacctactatgaaggacctggcgagggaagccccttcggctggaaggacatcaaagaatggtacgagatgctgatgggccactgcacctactttcccgaggaactgcggagcgtgaagtacgcctacaacgccgacctgtacaacgccctgaacgacctgaacaacctcgtgatcacccgggacgagaacgagaagctggaatattacgagaagttccagatcatcgagaacgtgttcaagcagaagaagaaacccacgctgaagcagatcgccaaagagatcctggtcaacgaggaagatatcaagggctacagagtgaccagcaccggcaagcccgagttcaccaacctgaaggtgtaccacgacatcaaggatatcacagcccggaaagagattattgagaacgccgagctgctggaccaaatcgccaagatcctgaccatctaccagagcagcgaggacatccaagaggaactgaccaatctgaactccgagctgacccaagaagagatcgagcagatctctaatctgaaggggtacaccggcacacacaacctgagcctgaaggccatcaacctgatcctggacgagctgtggcacaccaacgacaaccagattgccatcttcaacaggctgaagctggtgcccaagaaggtggacctgtctcagcagaaagaaatccccaccacactggtggacgacttcattctgagccccgtggtcaagaggagcttcatccagagcatcaaagtgatcaacgccatcatcaagaagtacgggctgcccaacgatatcatcatcgagctggcccgcgagaagaactccaaggacgcccagaaaatgatcaacgagatgcagaagaggaaccgccagaccaacgagcggatcgaggaaatcatccggaccaccggcaaagagaacgccaagtacctgatcgagaagatcaagctgcacgacatgcaagagggcaagtgcctgtacagcctggaagccattcctctggaagatctgctgaacaatcccttcaactatgaggtggaccacatcatccccagaagcgtgtccttcgacaacagcttcaacaacaaggtgctcgtgaagcaagaggaaaacagcaagaagggcaacagaaccccattccagtacctgagcagcagcgacagcaagatcagctacgaaaccttcaagaagcacatcctgaatctggccaaaggcaagggcagaatcagcaagaccaagaaagaatacctgctcgaggaacgggacatcaacagattcagcgtgcagaaagacttcatcaatcggaacctggtggacaccagatacgccaccagaggcctgatgaatctgctgcggagctacttcagagtgaacaatctggacgtgaaagtcaagtccatcaacggcggcttcaccagctttctgcggcggaagtggaagttcaagaaagagcggaacaagggctataagcaccacgccgaggacgccctgatcattgccaacgccgatttcatcttcaaagagtggaagaaactggacaaggccaaaaaagtgatggaaaaccagatgttcgaggaaaagcaggccgagagcatgcccgagatcgaaaccgagcaagagtacaaagagattttcatcacgccccaccagatcaagcacattaaggacttcaaggactacaagtacagccaccgcgtggacaagaagcccaatagagagctgattaacgacaccctgtactctacccggaaggacgacaagggcaataccctgatcgtcaacaacctgaacggcctgtacgacaaggacaacgacaagctcaagaagctgatcaacaagagccccgagaaactgctgatgtaccaccacgatcctcagacctaccagaaactgaagctcatcatggaacagtacggcgacgagaagaatcccctgtacaagtactacgaggaaaccgggaactacctgaccaagtactccaaaaaggacaatgggcccgtgatcaagaagattaagtattacggcaacaagctgaatgcccacctggacatcaccgacgactaccccaacagcagaaacaaggtggtcaagctgtccctgaagccttacagattcgacgtgtacctggacaacggcgtgtacaagttcgtgaccgtgaagaacctggacgtcatcaaaaaagaaaactactacgaagtcaacagcaagtgctatgaggaagccaagaaactcaagaaaatcagcaaccaggccgagtttatcgcctccttctacaacaacgatctgatcaagatcaacggggagctgtatagagtgatcggcgtgaacaatgacctgctgaaccggatcgaagtgaacatgatcgacatcacctaccgcgagtacctcgagaacatgaacgataagcggcctccacggatcattaagacaatcgccagcaagacgcagagcattaagaagtacagcacagacatcctgggcaacctgtacgaagtgaagtctaagaagcacccgcagattatcaagaaaggcagcggcgctcccaagaaaaaacggaaggtttaagagctcgctgatcagcctcgataagatacattgatgagtttggacaaaccacaactagaatgcagtgaaaaaaatgctttatttgtgaaatttgtgatgctattgctttatttgtaaccattataagctgcaataaacaagttaagcttgaattcagctgacgtgcctcggaccgctaggaacccctagtgatggagttggccactccctctctgcgcgctcgctcgctcactgaggccgggcgaccaaaggtcgcccgacgcccgggctttgcccgggcggcctcagtgagcgagcgagcgcgcag

SEQ ID NO: 279 - DNA, 3914 bp, Artificial Sequence
  source: /note="Description of Artificial Sequence: Synthetic polynucleotide"
ctgcgcgctcgctcgctcactgaggccgcccgggcgtcgggcgacctttggtcgcccggcctcagtgagcgagcgagcgcgcagagagggagtggccaactccatcactaggggttcctgcggccgcacgcgtgtgatgcggttttggcagtacatcaatgggcgtggatagcggtttgactcacggggatttccaagtctccaccccattgacgtcaatgggagtttgttttggcaccaaaatcaacgggactttccaaaatgtcgtaacaactccgccccattgacgcaaatgggcggtaggcgtgtacggtgggaggtctatataagcagagctcgtttagtgaaccgtcagatcgcctggagacgcaccggtgccaccatggcccctaagaagaagcggaaagtcggcagcggcaagcggaactatatcctgggcctcgacatcggcatcaccagcgttggctacggcatcatcgactacgagacacgggacgtgatcgatgccggcgtgcggctgtttaaagaggccaacgtcgagaacaacgagggccgcagatctaagagaggcgccagacggctgaagcggagaagaaggcacagaatccagagagtgaagaagctgctgttcgactacaacctgctgaccgaccacagcgagctgagcggcatcaatccttacgaggccagagtgaagggcctgagccagaagctgagcgaggaagagtttagcgccgctctgctgcacctggccaagagaagaggcgtgcacaacgtgaacgaggtggaagaggacaccggcaacgagctgtccaccaaagagcagatcagccggaacagcaaggccctggaagagaaatacgtggccgaactgcagctggaacggctgaaaaaggatggcgaagtgcggggcagcatcaatcggttcaagaccagcgactacgtgaaagaagccaaacagctgctgaaggtgcagaaggcctaccaccagctggaccagagcttcatcgacacctacatcgacctgctggaaacccggcggacctactatgaaggacctggcgagggaagccccttcggctggaaggacatcaaagaatggtacgagatgctgatgggccactgcacctactttcccgaggaactgcggagcgtgaagtacgcctacaacgccgacctgtacaacgccctgaacgacctgaacaacctcgtgatcacccgggacgagaacgagaagctggaatattacgagaagttccagatcatcgagaacgtgttcaagcagaagaagaaacccacgctgaagcagatcgccaaagagatcctggtcaacgaggaagatatcaagggctacagagtgaccagcaccggcaagcccgagttcaccaacctgaaggtgtaccacgacatcaaggatatcacagcccggaaagagattattgagaacgccgagctgctggaccaaatcgccaagatcctgaccatctaccagagcagcgaggacatccaagaggaactgaccaatctgaactccgagctgacccaagaagagatcgagcagatctctaatctgaaggggtacaccggcacacacaacctgagcctgaaggccatcaacctgatcctggacgagctgtggcacaccaacgacaaccagattgccatcttcaacaggctgaagctggtgcccaagaaggtggacctgtctcagcagaaagaaatccccaccacactggtggacgacttcattctgagccccgtggtcaagaggagcttcatccagagcatcaaagtgatcaacgccatcatcaagaagtacgggctgcccaacgatatcatcatcgagctggcccgcgagaagaactccaaggacgcccagaaaatgatcaacgagatgcagaagaggaaccgccagaccaacgagcggatcgaggaaatcatccggaccaccggcaaagagaacgccaagtacctgatcgagaagatcaagctgcacgacatgcaagagggcaagtgcctgtacagcctggaagccattcctctggaagatctgctgaacaatcccttcaactatgaggtggaccacatcatccccagaagcgtgtccttcgacaacagcttcaacaacaaggtgctcgtgaagcaagaggaaaacagcaagaagggcaacagaaccccattccagtacctgagcagcagcgacagcaagatcagctacgaaaccttcaagaagcacatcctgaatctggccaaaggcaagggcagaatcagcaagaccaagaaagaatacctgctcgaggaacgggacatcaacagattcagcgtgcagaaagacttcatcaatcggaacctggtggacaccagatacgccaccagaggcctgatgaatctgctgcggagctacttcagagtgaacaatctggacgtgaaagtcaagtccatcaacggcggcttcaccagctttctgcggcggaagtggaagttcaagaaagagcggaacaagggctataagcaccacgccgaggacgccctgatcattgccaacgccgatttcatcttcaaagagtggaagaaactggacaaggccaaaaaagtgatggaaaaccagatgttcgaggaaaagcaggccgagagcatgcccgagatcgaaaccgagcaagagtacaaagagattttcatcacgccccaccagatcaagcacattaaggacttcaaggactacaagtacagccaccgcgtggacaagaagcccaatagagagctgattaacgacaccctgtactctacccggaaggacgacaagggcaataccctgatcgtcaacaacctgaacggcctgtacgacaaggacaacgacaagctcaagaagctgatcaacaagagccccgagaaactgctgatgtaccaccacgatcctcagacctaccagaaactgaagctcatcatggaacagtacggcgacgagaagaatcccctgtacaagtactacgaggaaaccgggaactacctgaccaagtactccaaaaaggacaatgggcccgtgatcaagaagattaagtattacggcaacaagctgaatgcccacctggacatcaccgacgactaccccaacagcagaaacaaggtggtcaagctgtccctgaagccttacagattcgacgtgtacctggacaacggcgtgtacaagttcgtgaccgtgaagaacctggacgtcatcaaaaaagaaaactactacgaagtcaacagcaagtgctatgaggaagccaagaaactcaagaaaatcagcaaccaggccgagtttatcgcctccttctacaacaacgatctgatcaagatcaacggggagctgtatagagtgatcggcgtgaacaatgacctgctgaaccggatcgaagtgaacatgatcgacatcacctaccgcgagtacctcgagaacatgaacgataagcggcctccacggatcattaagacaatcgccagcaagacgcagagcattaagaagtacagcacagacatcctgggcaacctgtacgaagtgaagtctaagaagcacccgcagattatcaagaaaggcagcggcgctcccaagaaaaaacggaaggtttaagagctcgctgatcagcctcgataagatacattgatgagtttggacaaaccacaactagaatgcagtgaaaaaaatgctttatttgtgaaatttgtgatgctattgctttatttgtaaccattataagctgcaataaacaagttaagcttgaattcagctgacgtgcctcggaccgctaggaacccctagtgatggagttggccactccctctctgcgcgctcgctcgctcactgaggccgggcgaccaaaggtcgcccgacgcccgggctttgcccgggcggcctcagtgagcgagcgagcgcgcag

SEQ ID NO: 280 - DNA, 6587 bp, Artificial Sequence
  source: /note="Description of Artificial Sequence: Synthetic polynucleotide"
cctgcaggcagctgcgcgctcgctcgctcactgaggccgcccgggcgtcgggcgacctttggtcgcccggcctcagtgagcgagcgagcgcgcagagagggagtggccaactccatcactaggggttcctgcggccgcacgcgtcgttacataacttacggtaaatggcccgcctggctgaccgcccaacgacccccgcccattgacgtcaataatgacgtatgttcccatagtaacgccaatagggactttccattgacgtcaatgggtggagtatttacggtaaactgcccacttggcagtacatcaagtgtatcatatgccaagtacgccccctattgacgtcaatgacggtaaatggcccgcctggcattatgcccagtacatgaccttatgggactttcctacttggcagtacatctacgtattagtcatcgctattaccatggtgatgcggttttggcagtacatcaatgggcgtggatagcggtttgactcacggggatttccaagtctccaccccattgacgtcaatgggagtttgttttggcaccaaaatcaacgggactttccaaaatgtcgtaacaactccgccccattgacgcaaatgggcggtaggcgtgtacggtgggaggtctatataagcagagctcgtttagtgaaccgtcagatcgcctggagacgcaccggtgccaccatggcccctaagaagaagcggaaagtcggcagcggcaagcggaactatatcctgggcctcgccatcggcatcaccagcgttggctacggcatcatcgactacgagacacgggacgtgatcgatgccggcgtgcggctgtttaaagaggccaacgtcgagaacaacgagggccgcagatctaagagaggcgccagacggctgaagcggagaagaaggcacagaatccagagagtgaagaagctgctgttcgactacaacctgctgaccgaccacagcgagctgagcggcatcaatccttacgaggccagagtgaagggcctgagccagaagctgagcgaggaagagtttagcgccgctctgctgcacctggccaagagaagaggcgtgcacaacgtgaacgaggtggaagaggacaccggcaacgagctgtccaccaaagagcagatcagccggaacagcaaggccctggaagagaaatacgtggccgaactgcagctggaacggctgaaaaaggatggcgaagtgcggggcagcatcaatcggttcaagaccagcgactacgtgaaagaagccaaacagctgctgaaggtgcagaaggcctaccaccagctggaccagagcttcatcgacacctacatcgacctgctggaaacccggcggacctactatgaaggacctggcgagggaagccccttcggctggaaggacatcaaagaatggtacgagatgctgatgggccactgcacctactttcccgaggaactgcggagcgtgaagtacgcctacaacgccgacctgtacaacgccctgaacgacctgaacaacctcgtgatcacccgggacgagaacgagaagctggaatattacgagaagttccagatcatcgagaacgtgttcaagcagaagaagaaacccacgctgaagcagatcgccaaagagatcctggtcaacgaggaagatatcaagggctacagagtgaccagcaccggcaagcccgagttcaccaacctgaaggtgtaccacgacatcaaggatatcacagcccggaaagagattattgagaacgccgagctgctggaccaaatcgccaagatcctgaccatctaccagagcagcgaggacatccaagaggaactgaccaatctgaactccgagctgacccaagaagagatcgagcagatctctaatctgaaggggtacaccggcacacacaacctgagcctgaaggccatcaacctgatcctggacgagctgtggcacaccaacgacaaccagattgccatcttcaacaggctgaagctggtgcccaagaaggtggacctgtctcagcagaaagaaatccccaccacactggtggacgacttcattctgagccccgtggtcaagaggagcttcatccagagcatcaaagtgatcaacgccatcatcaagaagtacgggctgcccaacgatatcatcatcgagctggcccgcgagaagaactccaaggacgcccagaaaatgatcaacgagatgcagaagaggaaccgccagaccaacgagcggatcgaggaaatcatccggaccaccggcaaagagaacgccaagtacctgatcgagaagatcaagctgcacgacatgcaagagggcaagtgcctgtacagcctggaagccattcctctggaagatctgctgaacaatcccttcaactatgaggtggaccacatcatccccagaagcgtgtccttcgacaacagcttcaacaacaaggtgctcgtgaagcaagaggaagccagcaagaagggcaacagaaccccattccagtacctgagcagcagcgacagcaagatcagctacgaaaccttcaagaagcacatcctgaatctggccaaaggcaagggcagaatcagcaagaccaagaaagaatacctgctcgaggaacgggacatcaacagattcagcgtgcagaaagacttcatcaatcggaacctggtggacaccagatacgccaccagaggcctgatgaatctgctgcggagctacttcagagtgaacaatctggacgtgaaagtcaagtccatcaacggcggcttcaccagctttctgcggcggaagtggaagttcaagaaagagcggaacaagggctataagcaccacgccgaggacgccctgatcattgccaacgccgatttcatcttcaaagagtggaagaaactggacaaggccaaaaaagtgatggaaaaccagatgttcgaggaaaagcaggccgagagcatgcccgagatcgaaaccgagcaagagtacaaagagattttcatcacgccccaccagatcaagcacattaaggacttcaaggactacaagtacagccaccgcgtggacaagaagcccaatagagagctgattaacgacaccctgtactctacccggaaggacgacaagggcaataccctgatcgtcaacaacctgaacggcctgtacgacaaggacaacgacaagctcaagaagctgatcaacaagagccccgagaaactgctgatgtaccaccacgatcctcagacctaccagaaactgaagctcatcatggaacagtacggcgacgagaagaatcccctgtacaagtactacgaggaaaccgggaactacctgaccaagtactccaaaaaggacaatgggcccgtgatcaagaagattaagtattacggcaacaagctgaatgcccacctggacatcaccgacgactaccccaacagcagaaacaaggtggtcaagctgtccctgaagccttacagattcgacgtgtacctggacaacggcgtgtacaagttcgtgaccgtgaagaacctggacgtcatcaaaaaagaaaactactacgaagtcaacagcaagtgctatgaggaagccaagaaactcaagaaaatcagcaaccaggccgagtttatcgcctccttctacaacaacgatctgatcaagatcaacggggagctgtatagagtgatcggcgtgaacaatgacctgctgaaccggatcgaagtgaacatgatcgacatcacctaccgcgagtacctcgagaacatgaacgataagcggcctccacggatcattaagacaatcgccagcaagacgcagagcattaagaagtacagcacagacatcctgggcaacctgtacgaagtgaagtctaagaagcacccgcagattatcaagaaaggcagcggcgctcccaagaaaaaacggaaggtttaagagctcgctgatcagcctcgataagatacattgatgagtttggacaaaccacaactagaatgcagtgaaaaaaatgctttatttgtgaaatttgtgatgctattgctttatttgtaaccattataagctgcaataaacaagttaagcttgaattcagctgacgtgcctcggaccgctaggaacccctagtgatggagttggccactccctctctgcgcgctcgctcgctcactgaggccgggcgaccaaaggtcgcccgacgcccgggctttgcccgggcggcctcagtgagcgagcgagcgcgcagctgcctgcaggggcgcctgatgcggtattttctccttacgcatctgtgcggtatttcacaccgcatacgtcaaagcaaccatagtacgcgccctgtagcggcgcattaagcgcggcgggtgtggtggttacgcgcagcgtgaccgctacacttgccagcgccctagcgcccgctcctttcgctttcttcccttcctttctcgccacgttcgccggctttccccgtcaagctctaaatcgggggctccctttagggttccgatttagtgctttacggcacctcgaccccaaaaaacttgatttgggtgatggttcacgtagtgggccatcgccctgatagacggtttttcgccctttgacgttggagtccacgttctttaatagtggactcttgttccaaactggaacaacactcaaccctatctcgggctattcttttgatttataagggattttgccgatttcggcctattggttaaaaaatgagctgatttaacaaaaatttaacgcgaattttaacaaaatattaacgtttacaattttatggtgcactctcagtacaatctgctctgatgccgcatagttaagccagccccgacacccgccaacacccgctgacgcgccctgacgggcttgtctgctcccggcatccgcttacagacaagctgtgaccgtctccgggagctgcatgtgtcagaggttttcaccgtcatcaccgaaacgcgcgagacgaaagggcctcgtgatacgcctatttttataggttaatgtcatgaacaataaaactgtctgcttacataaacagtaatacaaggggtgttatgagccatattcaacgggaaacgtcgaggccgcgattaaattccaacatggatgctgatttatatgggtataaatgggctcgcgataatgtcgggcaatcaggtgcgacaatctatcgcttgtatgggaagcccgatgcgccagagttgtttctgaaacatggcaaaggtagcgttgccaatgatgttacagatgagatggtcagactaaactggctgacggaatttatgcctcttccgaccatcaagcattttatccgtactcctgatgatgcatggttactcaccactgcgatccccggaaaaacagcattccaggtattagaagaatatcctgattcaggtgaaaatattgttgatgcgctggcagtgttcctgcgccggttgcattcgattcctgtttgtaattgtccttttaacagcgatcgcgtatttcgtctcgctcaggcgcaatcacgaatgaataacggtttggttgatgcgagtgattttgatgacgagcgtaatggctggcctgttgaacaagtctggaaagaaatgcataaacttttgccattctcaccggattcagtcgtcactcatggtgatttctcacttgataaccttatttttgacgaggggaaattaataggttgtattgatgttggacgagtcggaatcgcagaccgataccaggatcttgccatcctatggaactgcctcggtgagttttctccttcattacagaaacggctttttcaaaaatatggtattgataatcctgatatgaataaattgcagtttcatttgatgctcgatgagtttttctaatctcatgaccaaaatcccttaacgtgagttttcgttccactgagcgtcagaccccgtagaaaagatcaaaggatcttcttgagatcctttttttctgcgcgtaatctgctgcttgcaaacaaaaaaaccaccgctaccagcggtggtttgtttgccggatcaagagctaccaactctttttccgaaggtaactggcttcagcagagcgcagataccaaatactgtccttctagtgtagccgtagttaggccaccacttcaagaactctgtagcaccgcctacatacctcgctctgctaatcctgttaccagtggctgctgccagtggcgataagtcgtgtcttaccgggttggactcaagacgatagttaccggataaggcgcagcggtcgggctgaacggggggttcgtgcacacagcccagcttggagcgaacgacctacaccgaactgagatacctacagcgtgagctatgagaaagcgccacgcttcccgaagggagaaaggcggacaggtatccggtaagcggcagggtcggaacaggagagcgcacgagggagcttccagggggaaacgcctggtatctttatagtcctgtcgggtttcgccacctctgacttgagcgtcgatttttgtgatgctcgtcaggggggcggagcctatggaaaaacgccagcaacgcggcctttttacggttcctggccttttgctggccttttgctcacatgt

SEQ ID NO: 281 - DNA, 5388 bp, Artificial Sequence
  source: /note="Description of Artificial Sequence: Synthetic polynucleotide"
ctgcgcgctcgctcgctcactgaggccgcccgggcgtcgggcgacctttggtcgcccggcctcagtgagcgagcgagcgcgcagagagggagtggccaactccatcactaggggttcctgcggccgcacgcgtctagatcccatatatggagttccgcgttacataacttacggtaaatggcccgcctggctgaccgcccaacgacccccgcccattgacgtcaataatgacgtatgttcccatagtaacgccaatagggactttccattgacgtcaatgggtggagtatttacggtaaactgcccacttggcagtacatcaagtgtatcatatgccaagtacgccccctattgacgtcaatgacggtaaatggcccgcctggcattatgcccagtacatgaccttatgggactttcctacttggcagtacatctacgtattagtcatcgctattaccatggtgatgcggttttggcagtacatcaatgggcgtggatagcggtttgactcacggggatttccaagtctccaccccattgacgtcaatgggagtttgttttggcaccaaaatcaacgggactttccaaaatgtcgtaacaactccgccccattgacgcaaatgggcggtaggcgtgtacggtgggaggtctatataagcagagctcgtttagtgaaccgtcagatcgcctggagacgcaccggtgccaccatggcccctaagaagaagcggaaagtcggcagcggcaagcggaactatatcctgggcctcgacatcggcatcaccagcgttggctacggcatcatcgactacgagacacgggacgtgatcgatgccggcgtgcggctgtttaaagaggccaacgtcgagaacaacgagggccgcagatctaagagaggcgccagacggctgaagcggagaagaaggcacagaatccagagagtgaagaagctgctgttcgactacaacctgctgaccgaccacagcgagctgagcggcatcaatccttacgaggccagagtgaagggcctgagccagaagctgagcgaggaagagtttagcgccgctctgctgcacctggccaagagaagaggcgtgcacaacgtgaacgaggtggaagaggacaccggcaacgagctgtccaccaaagagcagatcagccggaacagcaaggccctggaagagaaatacgtggccgaactgcagctggaacggctgaaaaaggatggcgaagtgcggggcagcatcaatcggttcaagaccagcgactacgtgaaagaagccaaacagctgctgaaggtgcagaaggcctaccaccagctggaccagagcttcatcgacacctacatcgacctgctggaaacccggcggacctactatgaaggacctggcgagggaagccccttcggctggaaggacatcaaagaatggtacgagatgctgatgggccactgcacctactttcccgaggaactgcggagcgtgaagtacgcctacaacgccgacctgtacaacgccctgaacgacctgaacaacctcgtgatcacccgggacgagaacgagaagctggaatattacgagaagttccagatcatcgagaacgtgttcaagcagaagaagaaacccacgctgaagcagatcgccaaagagatcctggtcaacgaggaagatatcaagggctacagagtgaccagcaccggcaagcccgagttcaccaacctgaaggtgtaccacgacatcaaggatatcacagcccggaaagagattattgagaacgccgagctgctggaccaaatcgccaagatcctgaccatctaccagagcagcgaggacatccaagaggaactgaccaatctgaactccgagctgacccaagaagagatcgagcagatctctaatctgaaggggtacaccggcacacacaacctgagcctgaaggccatcaacctgatcctggacgagctgtggcacaccaacgacaaccagattgccatcttcaacaggctgaagctggtgcccaagaaggtggacctgtctcagcagaaagaaatccccaccacactggtggacgacttcattctgagccccgtggtcaagaggagcttcatccagagcatcaaagtgatcaacgccatcatcaagaagtacgggctgcccaacgatatcatcatcgagctggcccgcgagaagaactccaaggacgcccagaaaatgatcaacgagatgcagaagaggaaccgccagaccaacgagcggatcgaggaaatcatccggaccaccggcaaagagaacgccaagtacctgatcgagaagatcaagctgcacgacatgcaagagggcaagtgcctgtacagcctggaagccattcctctggaagatctgctgaacaatcccttcaactatgaggtggaccacatcatccccagaagcgtgtccttcgacaacagcttcaacaacaaggtgctcgtgaagcaagaggaaaacagcaagaagggcaacagaaccccattccagtacctgagcagcagcgacagcaagatcagctacgaaaccttcaagaagcacatcctgaatctggccaaaggcaagggcagaatcagcaagaccaagaaagaatacctgctcgaggaacgggacatcaacagattcagcgtgcagaaagacttcatcaatcggaacctggtggacaccagatacgccaccagaggcctgatgaatctgctgcggagctacttcagagtgaacaatctggacgtgaaagtcaagtccatcaacggcggcttcaccagctttctgcggcggaagtggaagttcaagaaagagcggaacaagggctataagcaccacgccgaggacgccctgatcattgccaacgccgatttcatcttcaaagagtggaagaaactggacaaggccaaaaaagtgatggaaaaccagatgttcgaggaaaagcaggccgagagcatgcccgagatcgaaaccgagcaagagtacaaagagattttcatcacgccccaccagatcaagcacattaaggacttcaaggactacaagtacagccaccgcgtggacaagaagcccaatagagagctgattaacgacaccctgtactctacccggaaggacgacaagggcaataccctgatcgtcaacaacctgaacggcctgtacgacaaggacaacgacaagctcaagaagctgatcaacaagagccccgagaaactgctgatgtaccaccacgatcctcagacctaccagaaactgaagctcatcatggaacagtacggcgacgagaagaatcccctgtacaagtactacgaggaaaccgggaactacctgaccaagtactccaaaaaggacaatgggcccgtgatcaagaagattaagtattacggcaacaagctgaatgcccacctggacatcaccgacgactaccccaacagcagaaacaaggtggtcaagctgtccctgaagccttacagattcgacgtgtacctggacaacggcgtgtacaagttcgtgaccgtgaagaacctggacgtcatcaaaaaagaaaactactacgaagtcaacagcaagtgctatgaggaagccaagaaactcaagaaaatcagcaaccaggccgagtttatcgcctccttctacaacaacgatctgatcaagatcaacggggagctgtatagagtgatcggcgtgaacaatgacctgctgaaccggatcgaagtgaacatgatcgacatcacctaccgcgagtacctcgagaacatgaacgataagcggcctccacggatcattaagacaatcgccagcaagacgcagagcattaagaagtacagcacagacatcctgggcaacctgtacgaagtgaagtctaagaagcacccgcagattatcaagaaaggcagcggcgctcccaagaaaaaacggaaggttggctccggagagggcagaggaagtctgctaacatgcggtgacgtcgaggagaatcctggcccaatggagagcgacgagagcggcctgcccgccatggagatcgagtgccgcatcaccggcaccctgaacggcgtggagttcgagctggtgggcggcggagagggcacccccgagcagggccgcatgaccaacaagatgaagagcaccaaaggcgccctgaccttcagcccctacctgctgagccacgtgatgggctacggcttctaccacttcggcacctaccccagcggctacgagaaccccttcctgcacgccatcaacaacggcggctacaccaacacccgcatcgagaagtacgaggacggcggcgtgctgcacgtgagcttcagctaccgctacgaggccggccgcgtgatcggcgacttcaaggtgatgggcaccggcttccccgaggacagcgtgatcttcaccgacaagatcatccgcagcaacgccaccgtggagcacctgcaccccatgggcgataacgatctggatggcagcttcacccgcaccttcagcctgcgcgacggcggctactacagctccgtggtggacagccacatgcacttcaagagcgccatccaccccagcatcctgcagaacgggggccccatgttcgccttccgccgcgtggaggaggatcacagcaacaccgagctgggcatcgtggagtaccagcacgccttcaagaccccggatgcagatgccggtgaagaataagagctcgctgatcagcctcgataagatacattgatgagtttggacaaaccacaactagaatgcagtgaaaaaaatgctttatttgtgaaatttgtgatgctattgctttatttgtaaccattataagctgcaataaacaagttttaattaaggtcgggcaggaagagggcctatttcccatgattccttcatatttgcatatacgatacaaggctgttagagagataattagaattaatttgactgtaaacacaaagatattagtacaaaatacgtgacgtagaaagtaataatttcttgggtagtttgcagttttaaaattatgttttaaaatggactatcatatgcttaccgtaacttgaaagtatttcgatttcttggctttatatatcttgtggaaaggacgaaacaccgaagccgaaaaccacgatcatcgtttaagtactctgtgctggaaacagcacagaatctacttaaacaaggcaaaatgccgtgtttatctcgtcaacttgttggcgagattttttctaaagcttgaattcagctgacgtgcctcggaccgctaggaacccctagtgatggagttggccactccctctctgcgcgctcgctcgctcactgaggccgggcgaccaaaggtcgcccgacgcccgggctttgcccgggcggcctcagtgagcgagcgagcgcgcag

SEQ ID NO: 282 - DNA, 5388 bp, Artificial Sequence
  source: /note="Description of Artificial Sequence: Synthetic polynucleotide"
ctgcgcgctcgctcgctcactgaggccgcccgggcgtcgggcgacctttggtcgcccggcctcagtgagcgagcgagcgcgcagagagggagtggccaactccatcactaggggttcctgcggccgcacgcgtctagatcccatatatggagttccgcgttacataacttacggtaaatggcccgcctggctgaccgcccaacgacccccgcccattgacgtcaataatgacgtatgttcccatagtaacgccaatagggactttccattgacgtcaatgggtggagtatttacggtaaactgcccacttggcagtacatcaagtgtatcatatgccaagtacgccccctattgacgtcaatgacggtaaatggcccgcctggcattatgcccagtacatgaccttatgggactttcctacttggcagtacatctacgtattagtcatcgctattaccatggtgatgcggttttggcagtacatcaatgggcgtggatagcggtttgactcacggggatttccaagtctccaccccattgacgtcaatgggagtttgttttggcaccaaaatcaacgggactttccaaaatgtcgtaacaactccgccccattgacgcaaatgggcggtaggcgtgtacggtgggaggtctatataagcagagctcgtttagtgaaccgtcagatcgcctggagacgcaccggtgccaccatggcccctaagaagaagcggaaagtcggcagcggcaagcggaactatatcctgggcctcgccatcggcatcaccagcgttggctacggcatcatcgactacgagacacgggacgtgatcgatgccggcgtgcggctgtttaaagaggccaacgtcgagaacaacgagggccgcagatctaagagaggcgccagacggctgaagcggagaagaaggcacagaatccagagagtgaagaagctgctgttcgactacaacctgctgaccgaccacagcgagctgagcggcatcaatccttacgaggccagagtgaagggcctgagccagaagctgagcgaggaagagtttagcgccgctctgctgcacctggccaagagaagaggcgtgcacaacgtgaacgaggtggaagaggacaccggcaacgagctgtccaccaaagagcagatcagccggaacagcaaggccctggaagagaaatacgtggccgaactgcagctggaacggctgaaaaaggatggcgaagtgcggggcagcatcaatcggttcaagaccagcgactacgtgaaagaagccaaacagctgctgaaggtgcagaaggcctaccaccagctggaccagagcttcatcgacacctacatcgacctgctggaaacccggcggacctactatgaaggacctggcgagggaagccccttcggctggaaggacatcaaagaatggtacgagatgctgatgggccactgcacctactttcccgaggaactgcggagcgtgaagtacgcctacaacgccgacctgtacaacgccctgaacgacctgaacaacctcgtgatcacccgggacgagaacgagaagctggaatattacgagaagttccagatcatcgagaacgtgttcaagcagaagaagaaacccacgctgaagcagatcgccaaagagatcctggtcaacgaggaagatatcaagggctacagagtgaccagcaccggcaagcccgagttcaccaacctgaaggtgtaccacgacatcaaggatatcacagcccggaaagagattattgagaacgccgagctgctggaccaaatcgccaagatcctgaccatctaccagagcagcgaggacatccaagaggaactgaccaatctgaactccgagctgacccaagaagagatcgagcagatctctaatctgaaggggtacaccggcacacacaacctgagcctgaaggccatcaacctgatcctggacgagctgtggcacaccaacgacaaccagattgccatcttcaacaggctgaagctggtgcccaagaaggtggacctgtctcagcagaaagaaatccccaccacactggtggacgacttcattctgagccccgtggtcaagaggagcttcatccagagcatcaaagtgatcaacgccatcatcaagaagtacgggctgcccaacgatatcatcatcgagctggcccgcgagaagaactccaaggacgcccagaaaatgatcaacgagatgcagaagaggaaccgccagaccaacgagcggatcgaggaaatcatccggaccaccggcaaagagaacgccaagtacctgatcgagaagatcaagctgcacgacatgcaagagggcaagtgcctgtacagcctggaagccattcctctggaagatctgctgaacaatcccttcaactatgaggtggaccacatcatccccagaagcgtgtccttcgacaacagcttcaacaacaaggtgctcgtgaagcaagaggaagccagcaagaagggcaacagaaccccattccagtacctgagcagcagcgacagcaagatcagctacgaaaccttcaagaagcacatcctgaatctggccaaaggcaagggcagaatcagcaagaccaagaaagaatacctgctcgaggaacgggacatcaacagattcagcgtgcagaaagacttcatcaatcggaacctggtggacaccagatacgccaccagaggcctgatgaatctgctgcggagctacttcagagtgaacaatctggacgtgaaagtcaagtccatcaacggcggcttcaccagctttctgcggcggaagtggaagttcaagaaagagcggaacaagggctataagcaccacgccgaggacgccctgatcattgccaacgccgatttcatcttcaaagagtggaagaaactggacaaggccaaaaaagtgatggaaaaccagatgttcgaggaaaagcaggccgagagcatgcccgagatcgaaaccgagcaagagtacaaagagattttcatcacgccccaccagatcaagcacattaaggacttcaaggactacaagtacagccaccgcgtggacaagaagcccaatagagagctgattaacgacaccctgtactctacccggaaggacgacaagggcaataccctgatcgtcaacaacctgaacggcctgtacgacaaggacaacgacaagctcaagaagctgatcaacaagagccccgagaaactgctgatgtaccaccacgatcctcagacctaccagaaactgaagctcatcatggaacagtacggcgacgagaagaatcccctgtacaagtactacgaggaaaccgggaactacctgaccaagtactccaaaaaggacaatgggcccgtgatcaagaagattaagtattacggcaacaagctgaatgcccacctggacatcaccgacgactaccccaacagcagaaacaaggtggtcaagctgtccctgaagccttacagattcgacgtgtacctggacaacggcgtgtacaagttcgtgaccgtgaagaacctggacgtcatcaaaaaagaaaactactacgaagtcaacagcaagtgctatgaggaagccaagaaactcaagaaaatcagcaaccaggccgagtttatcgcctccttctacaacaacgatctgatcaagatcaacggggagctgtatagagtgatcggcgtgaacaatgacctgctgaaccggatcgaagtgaacatgatcgacatcacctaccgcgagtacctcgagaacatgaacgataagcggcctccacggatcattaagacaatcgccagcaagacgcagagcattaagaagtacagcacagacatcctgggcaacctgtacgaagtgaagtctaagaagcacccgcagattatcaagaaaggcagcggcgctcccaagaaaaaacggaaggttggctccggagagggcagaggaagtctgctaacatgcggtgacgtcgaggagaatcctggcccaatggagagcgacgagagcggcctgcccgccatggagatcgagtgccgcatcaccggcaccctgaacggcgtggagttcgagctggtgggcggcggagagggcacccccgagcagggccgcatgaccaacaagatgaagagcaccaaaggcgccctgaccttcagcccctacctgctgagccacgtgatgggctacggcttctaccacttcggcacctaccccagcggctacgagaaccccttcctgcacgccatcaacaacggcggctacaccaacacccgcatcgagaagtacgaggacggcggcgtgctgcacgtgagcttcagctaccgctacgaggccggccgcgtgatcggcgacttcaaggtgatgggcaccggcttccccgaggacagcgtgatcttcaccgacaagatcatccgcagcaacgccaccgtggagcacctgcaccccatgggcgataacgatctggatggcagcttcacccgcaccttcagcctgcgcgacggcggctactacagctccgtggtggacagccacatgcacttcaagagcgccatccaccccagcatcctgcagaacgggggccccatgttcgccttccgccgcgtggaggaggatcacagcaacaccgagctgggcatcgtggagtaccagcacgccttcaagaccccggatgcagatgccggtgaagaataagagctcgctgatcagcctcgataagatacattgatgagtttggacaaaccacaactagaatgcagtgaaaaaaatgctttatttgtgaaatttgtgatgctattgctttatttgtaaccattataagctgcaataaacaagttttaattaaggtcgggcaggaagagggcctatttcccatgattccttcatatttgcatatacgatacaaggctgttagagagataattagaattaatttgactgtaaacacaaagatattagtacaaaatacgtgacgtagaaagtaataatttcttgggtagtttgcagttttaaaattatgttttaaaatggactatcatatgcttaccgtaacttgaaagtatttcgatttcttggctttatatatcttgtggaaaggacgaaacaccgaagccgaaaaccacgatcatcgtttaagtactctgtgctggaaacagcacagaatctacttaaacaaggcaaaatgccgtgtttatctcgtcaacttgttggcgagattttttctaaagcttgaattcagctgacgtgcctcggaccgctaggaacccctagtgatggagttggccactccctctctgcgcgctcgctcgctcactgaggccgggcgaccaaaggtcgcccgacgcccgggctttgcccgggcggcctcagtgagcgagcgagcgcgcag

SEQ ID NO: 283 - DNA, 5388 bp, Artificial Sequence
  source: /note="Description of Artificial Sequence: Synthetic polynucleotide"
ctgcgcgctcgctcgctcactgaggccgcccgggcgtcgggcgacctttggtcgcccggcctcagtgagcgagcgagcgcgcagagagggagtggccaactccatcactaggggttcctgcggccgcacgcgtctagatcccatatatggagttccgcgttacataacttacggtaaatggcccgcctggctgaccgcccaacgacccccgcccattgacgtcaataatgacgtatgttcccatagtaacgccaatagggactttccattgacgtcaatgggtggagtatttacggtaaactgcccacttggcagtacatcaagtgtatcatatgccaagtacgccccctattgacgtcaatgacggtaaatggcccgcctggcattatgcccagtacatgaccttatgggactttcctacttggcagtacatctacgtattagtcatcgctattaccatggtgatgcggttttggcagtacatcaatgggcgtggatagcggtttgactcacggggatttccaagtctccaccccattgacgtcaatgggagtttgttttggcaccaaaatcaacgggactttccaaaatgtcgtaacaactccgccccattgacgcaaatgggcggtaggcgtgtacggtgggaggtctatataagcagagctcgtttagtgaaccgtcagatcgcctggagacgcaccggtgccaccatggcccctaagaagaagcggaaagtcggcagcggcaagcggaactatatcctgggcctcgacatcggcatcaccagcgttggctacggcatcatcgactacgagacacgggacgtgatcgatgccggcgtgcggctgtttaaagaggccaacgtcgagaacaacgagggccgcagatctaagagaggcgccagacggctgaagcggagaagaaggcacagaatccagagagtgaagaagctgctgttcgactacaacctgctgaccgaccacagcgagctgagcggcatcaatccttacgaggccagagtgaagggcctgagccagaagctgagcgaggaagagtttagcgccgctctgctgcacctggccaagagaagaggcgtgcacaacgtgaacgaggtggaagaggacaccggcaacgagctgtccaccaaagagcagatcagccggaacagcaaggccctggaagagaaatacgtggccgaactgcagctggaacggctgaaaaaggatggcgaagtgcggggcagcatcaatcggttcaagaccagcgactacgtgaaagaagccaaacagctgctgaaggtgcagaaggcctaccaccagctggaccagagcttcatcgacacctacatcgacctgctggaaacccggcggacctactatgaaggacctggcgagggaagccccttcggctggaaggacatcaaagaatggtacgagatgctgatgggccactgcacctactttcccgaggaactgcggagcgtgaagtacgcctacaacgccgacctgtacaacgccctgaacgacctgaacaacctcgtgatcacccgggacgagaacgagaagctggaatattacgagaagttccagatcatcgagaacgtgttcaagcagaagaagaaacccacgctgaagcagatcgccaaagagatcctggtcaacgaggaagatatcaagggctacagagtgaccagcaccggcaagcccgagttcaccaacctgaaggtgtaccacgacatcaaggatatcacagcccggaaagagattattgagaacgccgagctgctggaccaaatcgccaagatcctgaccatctaccagagcagcgaggacatccaagaggaactgaccaatctgaactccgagctgacccaagaagagatcgagcagatctctaatctgaaggggtacaccggcacacacaacctgagcctgaaggccatcaacctgatcctggacgagctgtggcacaccaacgacaaccagattgccatcttcaacaggctgaagctggtgcccaagaaggtggacctgtctcagcagaaagaaatccccaccacactggtggacgacttcattctgagccccgtggtcaagaggagcttcatccagagcatcaaagtgatcaacgccatcatcaagaagtacgggctgcccaacgatatcatcatcgagctggcccgcgagaagaactccaaggacgcccagaaaatgatcaacgagatgcagaagaggaaccgccagaccaacgagcggatcgaggaaatcatccggaccaccggcaaagagaacgccaagtacctgatcgagaagatcaagctgcacgacatgcaagagggcaagtgcctgtacagcctggaagccattcctctggaagatctgctgaacaatcccttcaactatgaggtggaccacatcatccccagaagcgtgtccttcgacaacagcttcaacaacaaggtgctcgtgaagcaagaggaaaacagcaagaagggcaacagaaccccattccagtacctgagcagcagcgacagcaagatcagctacgaaaccttcaagaagcacatcctgaatctggccaaaggcaagggcagaatcagcaagaccaagaaagaatacctgctcgaggaacgggacatcaacagattcagcgtgcagaaagacttcatcaatcggaacctggtggacaccagatacgccaccagaggcctgatgaatctgctgcggagctacttcagagtgaacaatctggacgtgaaagtcaagtccatcaacggcggcttcaccagctttctgcggcggaagtggaagttcaagaaagagcggaacaagggctataagcaccacgccgaggacgccctgatcattgccaacgccgatttcatcttcaaagagtggaagaaactggacaaggccaaaaaagtgatggaaaaccagatgttcgaggaaaagcaggccgagagcatgcccgagatcgaaaccgagcaagagtacaaagagattttcatcacgccccaccagatcaagcacattaaggacttcaaggactacaagtacagccaccgcgtggacaagaagcccaatagagagctgattaacgacaccctgtactctacccggaaggacgacaagggcaataccctgatcgtcaacaacctgaacggcctgtacgacaaggacaacgacaagctcaagaagctgatcaacaagagccccgagaaactgctgatgtaccaccacgatcctcagacctaccagaaactgaagctcatcatggaacagtacggcgacgagaagaatcccctgtacaagtactacgaggaaaccgggaactacctgaccaagtactccaaaaaggacaatgggcccgtgatcaagaagattaagtattacggcaacaagctgaatgcccacctggacatcaccgacgactaccccaacagcagaaacaaggtggtcaagctgtccctgaagccttacagattcgacgtgtacctggacaacggcgtgtacaagttcgtgaccgtgaagaacctggacgtcatcaaaaaagaaaactactacgaagtcaacagcaagtgctatgaggaagccaagaaactcaagaaaatcagcaaccaggccgagtttatcgcctccttctacaacaacgatctgatcaagatcaacggggagctgtatagagtgatcggcgtgaacaatgacctgctgaaccggatcgaagtgaacatgatcgacatcacctaccgcgagtacctcgagaacatgaacgataagcggcctccacggatcattaagacaatcgccagcaagacgcagagcattaagaagtacagcacagacatcctgggcaacctgtacgaagtgaagtctaagaagcacccgcagattatcaagaaaggcagcggcgctcccaagaaaaaacggaaggttggctccggagagggcagaggaagtctgctaacatgcggtgacgtcgaggagaatcctggcccaatggagagcgacgagagcggcctgcccgccatggagatcgagtgccgcatcaccggcaccctgaacggcgtggagttcgagctggtgggcggcggagagggcacccccgagcagggccgcatgaccaacaagatgaagagcaccaaaggcgccctgaccttcagcccctacctgctgagccacgtgatgggctacggcttctaccacttcggcacctaccccagcggctacgagaaccccttcctgcacgccatcaacaacggcggctacaccaacacccgcatcgagaagtacgaggacggcggcgtgctgcacgtgagcttcagctaccgctacgaggccggccgcgtgatcggcgacttcaaggtgatgggcaccggcttccccgaggacagcgtgatcttcaccgacaagatcatccgcagcaacgccaccgtggagcacctgcaccccatgggcgataacgatctggatggcagcttcacccgcaccttcagcctgcgcgacggcggctactacagctccgtggtggacagccacatgcacttcaagagcgccatccaccccagcatcctgcagaacgggggccccatgttcgccttccgccgcgtggaggaggatcacagcaacaccgagctgggcatcgtggagtaccagcacgccttcaagaccccggatgcagatgccggtgaagaataagagctcgctgatcagcctcgataagatacattgatgagtttggacaaaccacaactagaatgcagtgaaaaaaatgctttatttgtgaaatttgtgatgctattgctttatttgtaaccattataagctgcaataaacaagttttaattaaggtcgggcaggaagagggcctatttcccatgattccttcatatttgcatatacgatacaaggctgttagagagataattagaattaatttgactgtaaacacaaagatattagtacaaaatacgtgacgtagaaagtaataatttcttgggtagtttgcagttttaaaattatgttttaaaatggactatcatatgcttaccgtaacttgaaagtatttcgatttcttggctttatatatcttgtggaaaggacgaaacaccgaggagcaccaggaacttgccagtttaagtactctgtgctggaaacagcacagaatctacttaaacaaggcaaaatgccgtgtttatctcgtcaacttgttggcgagattttttctaaagcttgaattcagctgacgtgcctcggaccgctaggaacccctagtgatggagttggccactccctctctgcgcgctcgctcgctcactgaggccgggcgaccaaaggtcgcccgacgcccgggctttgcccgggcggcctcagtgagcgagcgagcgcgcag

SEQ ID NO: 284 - DNA, 5388 bp, Artificial Sequence
  source: /note="Description of Artificial Sequence: Synthetic polynucleotide"
ctgcgcgctcgctcgctcactgaggccgcccgggcgtcgggcgacctttggtcgcccggcctcagtgagcgagcgagcgcgcagagagggagtggccaactccatcactaggggttcctgcggccgcacgcgtctagatcccatatatggagttccgcgttacataacttacggtaaatggcccgcctggctgaccgcccaacgacccccgcccattgacgtcaataatgacgtatgttcccatagtaacgccaatagggactttccattgacgtcaatgggtggagtatttacggtaaactgcccacttggcagtacatcaagtgtatcatatgccaagtacgccccctattgacgtcaatgacggtaaatggcccgcctggcattatgcccagtacatgaccttatgggactttcctacttggcagtacatctacgtattagtcatcgctattaccatggtgatgcggttttggcagtacatcaatgggcgtggatagcggtttgactcacggggatttccaagtctccaccccattgacgtcaatgggagtttgttttggcaccaaaatcaacgggactttccaaaatgtcgtaacaactccgccccattgacgcaaatgggcggtaggcgtgtacggtgggaggtctatataagcagagctcgtttagtgaaccgtcagatcgcctggagacgcaccggtgccaccatggcccctaagaagaagcggaaagtcggcagcggcaagcggaactatatcctgggcctcgccatcggcatcaccagcgttggctacggcatcatcgactacgagacacgggacgtgatcgatgccggcgtgcggctgtttaaagaggccaacgtcgagaacaacgagggccgcagatctaagagaggcgccagacggctgaagcggagaagaaggcacagaatccagagagtgaagaagctgctgttcgactacaacctgctgaccgaccacagcgagctgagcggcatcaatccttacgaggccagagtgaagggcctgagccagaagctgagcgaggaagagtttagcgccgctctgctgcacctggccaagagaagaggcgtgcacaacgtgaacgaggtggaagaggacaccggcaacgagctgtccaccaaagagcagatcagccggaacagcaaggccctggaagagaaatacgtggccgaactgcagctggaacggctgaaaaaggatggcgaagtgcggggcagcatcaatcggttcaagaccagcgactacgtgaaagaagccaaacagctgctgaaggtgcagaaggcctaccaccagctggaccagagcttcatcgacacctacatcgacctgctggaaacccggcggacctactatgaaggacctggcgagggaagccccttcggctggaaggacatcaaagaatggtacgagatgctgatgggccactgcacctactttcccgaggaactgcggagcgtgaagtacgcctacaacgccgacctgtacaacgccctgaacgacctgaacaacctcgtgatcacccgggacgagaacgagaagctggaatattacgagaagttccagatcatcgagaacgtgttcaagcagaagaagaaacccacgctgaagcagatcgccaaagagatcctggtcaacgaggaagatatcaagggctacagagtgaccagcaccggcaagcccgagttcaccaacctgaaggtgtaccacgacatcaaggatatcacagcccggaaagagattattgagaacgccgagctgctggaccaaatcgccaagatcctgaccatctaccagagcagcgaggacatccaagaggaactgaccaatctgaactccgagctgacccaagaagagatcgagcagatctctaatctgaaggggtacaccggcacacacaacctgagcctgaaggccatcaacctgatcctggacgagctgtggcacaccaacgacaaccagattgccatcttcaacaggctgaagctggtgcccaagaaggtggacctgtctcagcagaaagaaatccccaccacactggtggacgacttcattctgagccccgtggtcaagaggagcttcatccagagcatcaaagtgatcaacgccatcatcaagaagtacgggctgcccaacgatatcatcatcgagctggcccgcgagaagaactccaaggacgcccagaaaatgatcaacgagatgcagaagaggaaccgccagaccaacgagcggatcgaggaaatcatccggaccaccggcaaagagaacgccaagtacctgatcgagaagatcaagctgcacgacatgcaagagggcaagtgcctgtacagcctggaagccattcctctggaagatctgctgaacaatcccttcaactatgaggtggaccacatcatccccagaagcgtgtccttcgacaacagcttcaacaacaaggtgctcgtgaagcaagaggaagccagcaagaagggcaacagaaccccattccagtacctgagcagcagcgacagcaagatcagctacgaaaccttcaagaagcacatcctgaatctggccaaaggcaagggcagaatcagcaagaccaagaaagaatacctgctcgaggaacgggacatcaacagattcagcgtgcagaaagacttcatcaatcggaacctggtggacaccagatacgccaccagaggcctgatgaatctgctgcggagctacttcagagtgaacaatctggacgtgaaagtcaagtccatcaacggcggcttcaccagctttctgcggcggaagtggaagttcaagaaagagcggaacaagggctataagcaccacgccgaggacgccctgatcattgccaacgccgatttcatcttcaaagagtggaagaaactggacaaggccaaaaaagtgatggaaaaccagatgttcgaggaaaagcaggccgagagcatgcccgagatcgaaaccgagcaagagtacaaagagattttcatcacgccccaccagatcaagcacattaaggacttcaaggactacaagtacagccaccgcgtggacaagaagcccaatagagagctgattaacgacaccctgtactctacccggaaggacgacaagggcaataccctgatcgtcaacaacctgaacggcctgtacgacaaggacaacgacaagctcaagaagctgatcaacaagagccccgagaaactgctgatgtaccaccacgatcctcagacctaccagaaactgaagctcatcatggaacagtacggcgacgagaagaatcccctgtacaagtactacgaggaaaccgggaactacctgaccaagtactccaaaaaggacaatgggcccgtgatcaagaagattaagtattacggcaacaagctgaatgcccacctggacatcaccgacgactaccccaacagcagaaacaaggtggtcaagctgtccctgaagccttacagattcgacgtgtacctggacaacggcgtgtacaagttcgtgaccgtgaagaacctggacgtcatcaaaaaagaaaactactacgaagtcaacagcaagtgctatgaggaagccaagaaactcaagaaaatcagcaaccaggccgagtttatcgcctccttctacaacaacgatctgatcaagatcaacggggagctgtatagagtgatcggcgtgaacaatgacctgctgaaccggatcgaagtgaacatgatcgacatcacctaccgcgagtacctcgagaacatgaacgataagcggcctccacggatcattaagacaatcgccagcaagacgcagagcattaagaagtacagcacagacatcctgggcaacctgtacgaagtgaagtctaagaagcacccgcagattatcaagaaaggcagcggcgctcccaagaaaaaacggaaggttggctccggagagggcagaggaagtctgctaacatgcggtgacgtcgaggagaatcctggcccaatggagagcgacgagagcggcctgcccgccatggagatcgagtgccgcatcaccggcaccctgaacggcgtggagttcgagctggtgggcggcggagagggcacccccgagcagggccgcatgaccaacaagatgaagagcaccaaaggcgccctgaccttcagcccctacctgctgagccacgtgatgggctacggcttctaccacttcggcacctaccccagcggctacgagaaccccttcctgcacgccatcaacaacggcggctacaccaacacccgcatcgagaagtacgaggacggcggcgtgctgcacgtgagcttcagctaccgctacgaggccggccgcgtgatcggcgacttcaaggtgatgggcaccggcttccccgaggacagcgtgatcttcaccgacaagatcatccgcagcaacgccaccgtggagcacctgcaccccatgggcgataacgatctggatggcagcttcacccgcaccttcagcctgcgcgacggcggctactacagctccgtggtggacagccacatgcacttcaagagcgccatccaccccagcatcctgcagaacgggggccccatgttcgccttccgccgcgtggaggaggatcacagcaacaccgagctgggcatcgtggagtaccagcacgccttcaagaccccggatgcagatgccggtgaagaataagagctcgctgatcagcctcgataagatacattgatgagtttggacaaaccacaactagaatgcagtgaaaaaaatgctttatttgtgaaatttgtgatgctattgctttatttgtaaccattataagctgcaataaacaagttttaattaaggtcgggcaggaagagggcctatttcccatgattccttcatatttgcatatacgatacaaggctgttagagagataattagaattaatttgactgtaaacacaaagatattagtacaaaatacgtgacgtagaaagtaataatttcttgggtagtttgcagttttaaaattatgttttaaaatggactatcatatgcttaccgtaacttgaaagtatttcgatttcttggctttatatatcttgtggaaaggacgaaacaccgaggagcaccaggaacttgccagtttaagtactctgtgctggaaacagcacagaatctacttaaacaaggcaaaatgccgtgtttatctcgtcaacttgttggcgagattttttctaaagcttgaattcagctgacgtgcctcggaccgctaggaacccctagtgatggagttggccactccctctctgcgcgctcgctcgctcactgaggccgggcgaccaaaggtcgcccgacgcccgggctttgcccgggcggcctcagtgagcgagcgagcgcgcag

SEQ ID NO: 285 - DNA, 5388 bp, Artificial Sequence
  source: /note="Description of Artificial Sequence: Synthetic polynucleotide"
ctgcgcgctcgctcgctcactgaggccgcccgggcgtcgggcgacctttggtcgcccggcctcagtgagcgagcgagcgcgcagagagggagtggccaactccatcactaggggttcctgcggccgcacgcgtctagatcccatatatggagttccgcgttacataacttacggtaaatggcccgcctggctgaccgcccaacgacccccgcccattgacgtcaataatgacgtatgttcccatagtaacgccaatagggactttccattgacgtcaatgggtggagtatttacggtaaactgcccacttggcagtacatcaagtgtatcatatgccaagtacgccccctattgacgtcaatgacggtaaatggcccgcctggcattatgcccagtacatgaccttatgggactttcctacttggcagtacatctacgtattagtcatcgctattaccatggtgatgcggttttggcagtacatcaatgggcgtggatagcggtttgactcacggggatttccaagtctccaccccattgacgtcaatgggagtttgttttggcaccaaaatcaacgggactttccaaaatgtcgtaacaactccgccccattgacgcaaatgggcggtaggcgtgtacggtgggaggtctatataagcagagctcgtttagtgaaccgtcagatcgcctggagacgcaccggtgccaccatggcccctaagaagaagcggaaagtcggcagcggcaagcggaactatatcctgggcctcgacatcggcatcaccagcgttggctacggcatcatcgactacgagacacgggacgtgatcgatgccggcgtgcggctgtttaaagaggccaacgtcgagaacaacgagggccgcagatctaagagaggcgccagacggctgaagcggagaagaaggcacagaatccagagagtgaagaagctgctgttcgactacaacctgctgaccgaccacagcgagctgagcggcatcaatccttacgaggccagagtgaagggcctgagccagaagctgagcgaggaagagtttagcgccgctctgctgcacctggccaagagaagaggcgtgcacaacgtgaacgaggtggaagaggacaccggcaacgagctgtccaccaaagagcagatcagccggaacagcaaggccctggaagagaaatacgtggccgaactgcagctggaacggctgaaaaaggatggcgaagtgcggggcagcatcaatcggttcaagaccagcgactacgtgaaagaagccaaacagctgctgaaggtgcagaaggcctaccaccagctggaccagagcttcatcgacacctacatcgacctgctggaaacccggcggacctactatgaaggacctggcgagggaagccccttcggctggaaggacatcaaagaatggtacgagatgctgatgggccactgcacctactttcccgaggaactgcggagcgtgaagtacgcctacaacgccgacctgtacaacgccctgaacgacctgaacaacctcgtgatcacccgggacgagaacgagaagctggaatattacgagaagttccagatcatcgagaacgtgttcaagcagaagaagaaacccacgctgaagcagatcgccaaagagatcctggtcaacgaggaagatatcaagggctacagagtgaccagcaccggcaagcccgagttcaccaacctgaaggtgtaccacgacatcaaggatatcacagcccggaaagagattattgagaacgccgagctgctggaccaaatcgccaagatcctgaccatctaccagagcagcgaggacatccaagaggaactgaccaatctgaactccgagctgacccaagaagagatcgagcagatctctaatctgaaggggtacaccggcacacacaacctgagcctgaaggccatcaacctgatcctggacgagctgtggcacaccaacgacaaccagattgccatcttcaacaggctgaagctggtgcccaagaaggtggacctgtctcagcagaaagaaatccccaccacactggtggacgacttcattctgagccccgtggtcaagaggagcttcatccagagcatcaaagtgatcaacgccatcatcaagaagtacgggctgcccaacgatatcatcatcgagctggcccgcgagaagaactccaaggacgcccagaaaatgatcaacgagatgcagaagaggaaccgccagaccaacgagcggatcgaggaaatcatccggaccaccggcaaagagaacgccaagtacctgatcgagaagatcaagctgcacgacatgcaagagggcaagtgcctgtacagcctggaagccattcctctggaagatctgctgaacaatcccttcaactatgaggtggaccacatcatccccagaagcgtgtccttcgacaacagcttcaacaacaaggtgctcgtgaagcaagaggaaaacagcaagaagggcaacagaaccccattccagtacctgagcagcagcgacagcaagatcagctacgaaaccttcaagaagcacatcctgaatctggccaaaggcaagggcagaatcagcaagaccaagaaagaatacctgctcgaggaacgggacatcaacagattcagcgtgcagaaagacttcatcaatcggaacctggtggacaccagatacgccaccagaggcctgatgaatctgctgcggagctacttcagagtgaacaatctggacgtgaaagtcaagtccatcaacggcggcttcaccagctttctgcggcggaagtggaagttcaagaaagagcggaacaagggctataagcaccacgccgaggacgccctgatcattgccaacgccgatttcatcttcaaagagtggaagaaactggacaaggccaaaaaagtgatggaaaaccagatgttcgaggaaaagcaggccgagagcatgcccgagatcgaaaccgagcaagagtacaaagagattttcatcacgccccaccagatcaagcacattaaggacttcaaggactacaagtacagccaccgcgtggacaagaagcccaatagagagctgattaacgacaccctgtactctacccggaaggacgacaagggcaataccctgatcgtcaacaacctgaacggcctgtacgacaaggacaacgacaagctcaagaagctgatcaacaagagccccgagaaactgctgatgtaccaccacgatcctcagacctaccagaaactgaagctcatcatggaacagtacggcgacgagaagaatcccctgtacaagtactacgaggaaaccgggaactacctgaccaagtactccaaaaaggacaatgggcccgtgatcaagaagattaagtattacggcaacaagctgaatgcccacctggacatcaccgacgactaccccaacagcagaaacaaggtggtcaagctgtccctgaagccttacagattcgacgtgtacctggacaacggcgtgtacaagttcgtgaccgtgaagaacctggacgtcatcaaaaaagaaaactactacgaagtcaacagcaagtgctatgaggaagccaagaaactcaagaaaatcagcaaccaggccgagtttatcgcctccttctacaacaacgatctgatcaagatcaacggggagctgtatagagtgatcggcgtgaacaatgacctgctgaaccggatcgaagtgaacatgatcgacatcacctaccgcgagtacctcgagaacatgaacgataagcggcctccacggatcattaagacaatcgccagcaagacgcagagcattaagaagtacagcacagacatcctgggcaacctgtacgaagtgaagtctaagaagcacccgcagattatcaagaaaggcagcggcgctcccaagaaaaaacggaaggttggctccggagagggcagaggaagtctgctaacatgcggtgacgtcgaggagaatcctggcccaatggagagcgacgagagcggcctgcccgccatggagatcgagtgccgcatcaccggcaccctgaacggcgtggagttcgagctggtgggcggcggagagggcacccccgagcagggccgcatgaccaacaagatgaagagcaccaaaggcgccctgaccttcagcccctacctgctgagccacgtgatgggctacggcttctaccacttcggcacctaccccagcggctacgagaaccccttcctgcacgccatcaacaacggcggctacaccaacacccgcatcgagaagtacgaggacggcggcgtgctgcacgtgagcttcagctaccgctacgaggccggccgcgtgatcggcgacttcaaggtgatgggcaccggcttccccgaggacagcgtgatcttcaccgacaagatcatccgcagcaacgccaccgtggagcacctgcaccccatgggcgataacgatctggatggcagcttcacccgcaccttcagcctgcgcgacggcggctactacagctccgtggtggacagccacatgcacttcaagagcgccatccaccccagcatcctgcagaacgggggccccatgttcgccttccgccgcgtggaggaggatcacagcaacaccgagctgggcatcgtggagtaccagcacgccttcaagaccccggatgcagatgccggtgaagaataagagctcgctgatcagcctcgataagatacattgatgagtttggacaaaccacaactagaatgcagtgaaaaaaatgctttatttgtgaaatttgtgatgctattgctttatttgtaaccattataagctgcaataaacaagttttaattaaggtcgggcaggaagagggcctatttcccatgattccttcatatttgcatatacgatacaaggctgttagagagataattagaattaatttgactgtaaacacaaagatattagtacaaaatacgtgacgtagaaagtaataatttcttgggtagtttgcagttttaaaattatgttttaaaatggactatcatatgcttaccgtaacttgaaagtatttcgatttcttggctttatatatcttgtggaaaggacgaaacaccggcgctaccgccgcctgcagaagtttaagtactctgtgctggaaacagcacagaatctacttaaacaaggcaaaatgccgtgtttatctcgtcaacttgttggcgagattttttctaaagcttgaattcagctgacgtgcctcggaccgctaggaacccctagtgatggagttggccactccctctctgcgcgctcgctcgctcactgaggccgggcgaccaaaggtcgcccgacgcccgggctttgcccgggcggcctcagtgagcgagcgagcgcgcag

SEQ ID NO: 286 - DNA, 5388 bp, Artificial Sequence
  source: /note="Description of Artificial Sequence: Synthetic polynucleotide"
ctgcgcgctcgctcgctcactgaggccgcccgggcgtcgggcgacctttggtcgcccggcctcagtgagcgagcgagcgcgcagagagggagtggccaactccatcactaggggttcctgcggccgcacgcgtctagatcccatatatggagttccgcgttacataacttacggtaaatggcccgcctggctgaccgcccaacgacccccgcccattgacgtcaataatgacgtatgttcccatagtaacgccaatagggactttccattgacgtcaatgggtggagtatttacggtaaactgcccacttggcagtacatcaagtgtatcatatgccaagtacgccccctattgacgtcaatgacggtaaatggcccgcctggcattatgcccagtacatgaccttatgggactttcctacttggcagtacatctacgtattagtcatcgctattaccatggtgatgcggttttggcagtacatcaatgggcgtggatagcggtttgactcacggggatttccaagtctccaccccattgacgtcaatgggagtttgttttggcaccaaaatcaacgggactttccaaaatgtcgtaacaactccgccccattgacgcaaatgggcggtaggcgtgtacggtgggaggtctatataagcagagctcgtttagtgaaccgtcagatcgcctggagacgcaccggtgccaccatggcccctaagaagaagcggaaagtcggcagcggcaagcggaactatatcctgggcctcgacatcggcatcaccagcgttggctacggcatcatcgactacgagacacgggacgtgatcgatgccggcgtgcggctgtttaaagaggccaacgtcgagaacaacgagggccgcagatctaagagaggcgccagacggctgaagcggagaagaaggcacagaatccagagagtgaagaagctgctgttcgactacaacctgctgaccgaccacagcgagctgagcggcatcaatccttacgaggccagagtgaagggcctgagccagaagctgagcgaggaagagtttagcgccgctctgctgcacctggccaagagaagaggcgtgcacaacgtgaacgaggtggaagaggacaccggcaacgagctgtccaccaaagagcagatcagccggaacagcaaggccctggaagagaaatacgtggccgaactgcagctggaacggctgaaaaaggatggcgaagtgcggggcagcatcaatcggttcaagaccagcgactacgtgaaagaagccaaacagctgctgaaggtgcagaaggcctaccaccagctggaccagagcttcatcgacacctacatcgacctgctggaaacccggcggacctactatgaaggacctggcgagggaagccccttcggctggaaggacatcaaagaatggtacgagatgctgatgggccactgcacctactttcccgaggaactgcggagcgtgaagtacgcctacaacgccgacctgtacaacgccctgaacgacctgaacaacctcgtgatcacccgggacgagaacgagaagctggaatattacgagaagttccagatcatcgagaacgtgttcaagcagaagaagaaacccacgctgaagcagatcgccaaagagatcctggtcaacgaggaagatatcaagggctacagagtgaccagcaccggcaagcccgagttcaccaacctgaaggtgtaccacgacatcaaggatatcacagcccggaaagagattattgagaacgccgagctgctggaccaaatcgccaagatcctgaccatctaccagagcagcgaggacatccaagaggaactgaccaatctgaactccgagctgacccaagaagagatcgagcagatctctaatctgaaggggtacaccggcacacacaacctgagcctgaaggccatcaacctgatcctggacgagctgtggcacaccaacgacaaccagattgccatcttcaacaggctgaagctggtgcccaagaaggtggacctgtctcagcagaaagaaatccccaccacactggtggacgacttcattctgagccccgtggtcaagaggagcttcatccagagcatcaaagtgatcaacgccatcatcaagaagtacgggctgcccaacgatatcatcatcgagctggcccgcgagaagaactccaaggacgcccagaaaatgatcaacgagatgcagaagaggaaccgccagaccaacgagcggatcgaggaaatcatccggaccaccggcaaagagaacgccaagtacctgatcgagaagatcaagctgcacgacatgcaagagggcaagtgcctgtacagcctggaagccattcctctggaagatctgctgaacaatcccttcaactatgaggtggaccacatcatccccagaagcgtgtccttcgacaacagcttcaacaacaaggtgctcgtgaagcaagaggaaaacagcaagaagggcaacagaaccccattccagtacctgagcagcagcgacagcaagatcagctacgaaaccttcaagaagcacatcctgaatctggccaaaggcaagggcagaatcagcaagaccaagaaagaatacctgctcgaggaacgggacatcaacagattcagcgtgcagaaagacttcatcaatcggaacctggtggacaccagatacgccaccagaggcctgatgaatctgctgcggagctacttcagagtgaacaatctggacgtgaaagtcaagtccatcaacggcggcttcaccagctttctgcggcggaagtggaagttcaagaaagagcggaacaagggctataagcaccacgccgaggacgccctgatcattgccaacgccgatttcatcttcaaagagtggaagaaactggacaaggccaaaaaagtgatggaaaaccagatgttcgaggaaaagcaggccgagagcatgcccgagatcgaaaccgagcaagagtacaaagagattttcatcacgccccaccagatcaagcacattaaggacttcaaggactacaagtacagccaccgcgtggacaagaagcccaatagagagctgattaacgacaccctgtactctacccggaaggacgacaagggcaataccctgatcgtcaacaacctgaacggcctgtacgacaaggacaacgacaagctcaagaagctgatcaacaagagccccgagaaactgctgatgtaccaccacgatcctcagacctaccagaaactgaagctcatcatggaacagtacggcgacgagaagaatcccctgtacaagtactacgaggaaaccgggaactacctgaccaagtactccaaaaaggacaatgggcccgtgatcaagaagattaagtattacggcaacaagctgaatgcccacctggacatcaccgacgactaccccaacagcagaaacaaggtggtcaagctgtccctgaagccttacagattcgacgtgtacctggacaacggcgtgtacaagttcgtgaccgtgaagaacctggacgtcatcaaaaaagaaaactactacgaagtcaacagcaagtgctatgaggaagccaagaaactcaagaaaatcagcaaccaggccgagtttatcgcctccttctacaacaacgatctgatcaagatcaacggggagctgtatagagtgatcggcgtgaacaatgacctgctgaaccggatcgaagtgaacatgatcgacatcacctaccgcgagtacctcgagaacatgaacgataagcggcctccacggatcattaagacaatcgccagcaagacgcagagcattaagaagtacagcacagacatcctgggcaacctgtacgaagtgaagtctaagaagcacccgcagattatcaagaaaggcagcggcgctcccaagaaaaaacggaaggttggctccggagagggcagaggaagtctgctaacatgcggtgacgtcgaggagaatcctggcccaatggagagcgacgagagcggcctgcccgccatggagatcgagtgccgcatcaccggcaccctgaacggcgtggagttcgagctggtgggcggcggagagggcacccccgagcagggccgcatgaccaacaagatgaagagcaccaaaggcgccctgaccttcagcccctacctgctgagccacgtgatgggctacggcttctaccacttcggcacctaccccagcggctacgagaaccccttcctgcacgccatcaacaacggcggctacaccaacacccgcatcgagaagtacgaggacggcggcgtgctgcacgtgagcttcagctaccgctacgaggccggccgcgtgatcggcgacttcaaggtgatgggcaccggcttccccgaggacagcgtgatcttcaccgacaagatcatccgcagcaacgccaccgtggagcacctgcaccccatgggcgataacgatctggatggcagcttcacccgcaccttcagcctgcgcgacggcggctactacagctccgtggtggacagccacatgcacttcaagagcgccatccaccccagcatcctgcagaacgggggccccatgttcgccttccgccgcgtggaggaggatcacagcaacaccgagctgggcatcgtggagtaccagcacgccttcaagaccccggatgcagatgccggtgaagaataagagctcgctgatcagcctcgataagatacattgatgagtttggacaaaccacaactagaatgcagtgaaaaaaatgctttatttgtgaaatttgtgatgctattgctttatttgtaaccattataagctgcaataaacaagttttaattaaggtcgggcaggaagagggcctatttcccatgattccttcatatttgcatatacgatacaaggctgttagagagataattagaattaatttgactgtaaacacaaagatattagtacaaaatacgtgacgtagaaagtaataatttcttgggtagtttgcagttttaaaattatgttttaaaatggactatcatatgcttaccgtaacttgaaagtatttcgatttcttggctttatatatcttgtggaaaggacgaaacaccgtttcggcttggagtacatcgtgtttaagtactctgtgctggaaacagcacagaatctacttaaacaaggcaaaatgccgtgtttatctcgtcaacttgttggcgagattttttctaaagcttgaattcagctgacgtgcctcggaccgctaggaacccctagtgatggagttggccactccctctctgcgcgctcgctcgctcactgaggccgggcgaccaaaggtcgcccgacgcccgggctttgcccgggcggcctcagtgagcgagcgagcgcgcag

SEQ ID NO: 287 - DNA, 5388 bp, Artificial Sequence
  source: /note="Description of Artificial Sequence: Synthetic polynucleotide"
ctgcgcgctcgctcgctcactgaggccgcccgggcgtcgggcgacctttggtcgcccggcctcagtgagcgagcgagcgcgcagagagggagtggccaactccatcactaggggttcctgcggccgcacgcgtctagatcccatatatggagttccgcgttacataacttacggtaaatggcccgcctggctgaccgcccaacgacccccgcccattgacgtcaataatgacgtatgttcccatagtaacgccaatagggactttccattgacgtcaatgggtggagtatttacggtaaactgcccacttggcagtacatcaagtgtatcatatgccaagtacgccccctattgacgtcaatgacggtaaatggcccgcctggcattatgcccagtacatgaccttatgggactttcctacttggcagtacatctacgtattagtcatcgctattaccatggtgatgcggttttggcagtacatcaatgggcgtggatagcggtttgactcacggggatttccaagtctccaccccattgacgtcaatgggagtttgttttggcaccaaaatcaacgggactttccaaaatgtcgtaacaactccgccccattgacgcaaatgggcggtaggcgtgtacggtgggaggtctatataagcagagctcgtttagtgaaccgtcagatcgcctggagacgcaccggtgccaccatggcccctaagaagaagcggaaagtcggcagcggcaagcggaactatatcctgggcctcgacatcggcatcaccagcgttggctacggcatcatcgactacgagacacgggacgtgatcgatgccggcgtgcggctgtttaaagaggccaacgtcgagaacaacgagggccgcagatctaagagaggcgccagacggctgaagcggagaagaaggcacagaatccagagagtgaagaagctgctgttcgactacaacctgctgaccgaccacagcgagctgagcggcatcaatccttacgaggccagagtgaagggcctgagccagaagctgagcgaggaagagtttagcgccgctctgctgcacctggccaagagaagaggcgtgcacaacgtgaacgaggtggaagaggacaccggcaacgagctgtccaccaaagagcagatcagccggaacagcaaggccctggaagagaaatacgtggccgaactgcagctggaacggctgaaaaaggatggcgaagtgcggggcagcatcaatcggttcaagaccagcgactacgtgaaagaagccaaacagctgctgaaggtgcagaaggcctaccaccagctggaccagagcttcatcgacacctacatcgacctgctggaaacccggcggacctactatgaaggacctggcgagggaagccccttcggctggaaggacatcaaagaatggtacgagatgctgatgggccactgcacctactttcccgaggaactgcggagcgtgaagtacgcctacaacgccgacctgtacaacgccctgaacgacctgaacaacctcgtgatcacccgggacgagaacgagaagctggaatattacgagaagttccagatcatcgagaacgtgttcaagcagaagaagaaacccacgctgaagcagatcgccaaagagatcctggtcaacgaggaagatatcaagggctacagagtgaccagcaccggcaagcccgagttcaccaacctgaaggtgtaccacgacatcaaggatatcacagcccggaaagagattattgagaacgccgagctgctggaccaaatcgccaagatcctgaccatctaccagagcagcgaggacatccaagaggaactgaccaatctgaactccgagctgacccaagaagagatcgagcagatctctaatctgaaggggtacaccggcacacacaacctgagcctgaaggccatcaacctgatcctggacgagctgtggcacaccaacgacaaccagattgccatcttcaacaggctgaagctggtgcccaagaaggtggacctgtctcagcagaaagaaatccccaccacactggtggacgacttcattctgagccccgtggtcaagaggagcttcatccagagcatcaaagtgatcaacgccatcatcaagaagtacgggctgcccaacgatatcatcatcgagctggcccgcgagaagaactccaaggacgcccagaaaatgatcaacgagatgcagaagaggaaccgccagaccaacgagcggatcgaggaaatcatccggaccaccggcaaagagaacgccaagtacctgatcgagaagatcaagctgcacgacatgcaagagggcaagtgcctgtacagcctggaagccattcctctggaagatctgctgaacaatcccttcaactatgaggtggaccacatcatccccagaagcgtgtccttcgacaacagcttcaacaacaaggtgctcgtgaagcaagaggaaaacagcaagaagggcaacagaaccccattccagtacctgagcagcagcgacagcaagatcagctacgaaaccttcaagaagcacatcctgaatctggccaaaggcaagggcagaatcagcaagaccaagaaagaatacctgctcgaggaacgggacatcaacagattcagcgtgcagaaagacttcatcaatcggaacctggtggacaccagatacgccaccagaggcctgatgaatctgctgcggagctacttcagagtgaacaatctggacgtgaaagtcaagtccatcaacggcggcttcaccagctttctgcggcggaagtggaagttcaagaaagagcggaacaagggctataagcaccacgccgaggacgccctgatcattgccaacgccgatttcatcttcaaagagtggaagaaactggacaaggccaaaaaagtgatggaaaaccagatgttcgaggaaaagcaggccgagagcatgcccgagatcgaaaccgagcaagagtacaaagagattttcatcacgccccaccagatcaagcacattaaggacttcaaggactacaagtacagccaccgcgtggacaagaagcccaatagagagctgattaacgacaccctgtactctacccggaaggacgacaagggcaataccctgatcgtcaacaacctgaacggcctgtacgacaaggacaacgacaagctcaagaagctgatcaacaagagccccgagaaactgctgatgtaccaccacgatcctcagacctaccagaaactgaagctcatcatggaacagtacggcgacgagaagaatcccctgtacaagtactacgaggaaaccgggaactacctgaccaagtactccaaaaaggacaatgggcccgtgatcaagaagattaagtattacggcaacaagctgaatgcccacctggacatcaccgacgactaccccaacagcagaaacaaggtggtcaagctgtccctgaagccttacagattcgacgtgtacctggacaacggcgtgtacaagttcgtgaccgtgaagaacctggacgtcatcaaaaaagaaaactactacgaagtcaacagcaagtgctatgaggaagccaagaaactcaagaaaatcagcaaccaggccgagtttatcgcctccttctacaacaacgatctgatcaagatcaacggggagctgtatagagtgatcggcgtgaacaatgacctgctgaaccggatcgaagtgaacatgatcgacatcacctaccgcgagtacctcgagaacatgaacgataagcggcctccacggatcattaagacaatcgccagcaagacgcagagcattaagaagtacagcacagacatcctgggcaacctgtacgaagtgaagtctaagaagcacccgcagattatcaagaaaggcagcggcgctcccaagaaaaaacggaaggttggctccggagagggcagaggaagtctgctaacatgcggtgacgtcgaggagaatcctggcccaatggagagcgacgagagcggcctgcccgccatggagatcgagtgccgcatcaccggcaccctgaacggcgtggagttcgagctggtgggcggcggagagggcacccccgagcagggccgcatgaccaacaagatgaagagcaccaaaggcgccctgaccttcagcccctacctgctgagccacgtgatgggctacggcttctaccacttcggcacctaccccagcggctacgagaaccccttcctgcacgccatcaacaacggcggctacaccaacacccgcatcgagaagtacgaggacggcggcgtgctgcacgtgagcttcagctaccgctacgaggccggccgcgtgatcggcgacttcaaggtgatgggcaccggcttccccgaggacagcgtgatcttcaccgacaagatcatccgcagcaacgccaccgtggagcacctgcaccccatgggcgataacgatctggatggcagcttcacccgcaccttcagcctgcgcgacggcggctactacagctccgtggtggacagccacatgcacttcaagagcgccatccaccccagcatcctgcagaacgggggccccatgttcgccttccgccgcgtggaggaggatcacagcaacaccgagctgggcatcgtggagtaccagcacgccttcaagaccccggatgcagatgccggtgaagaataagagctcgctgatcagcctcgataagatacattgatgagtttggacaaaccacaactagaatgcagtgaaaaaaatgctttatttgtgaaatttgtgatgctattgctttatttgtaaccattataagctgcaataaacaagttttaattaaggtcgggcaggaagagggcctatttcccatgattccttcatatttgcatatacgatacaaggctgttagagagataattagaattaatttgactgtaaacacaaagatattagtacaaaatacgtgacgtagaaagtaataatttcttgggtagtttgcagttttaaaattatgttttaaaatggactatcatatgcttaccgtaacttgaaagtatttcgatttcttggctttatatatcttgtggaaaggacgaaacaccgccggatgctgctgccgctaccgtttaagtactctgtgctggaaacagcacagaatctacttaaacaaggcaaaatgccgtgtttatctcgtcaacttgttggcgagattttttctaaagcttgaattcagctgacgtgcctcggaccgctaggaacccctagtgatggagttggccactccctctctgcgcgctcgctcgctcactgaggccgggcgaccaaaggtcgcccgacgcccgggctttgcccgggcggcctcagtgagcgagcgagcgcgcag

SEQ ID NO: 288 - DNA, 5388 bp, Artificial Sequence
  source: /note="Description of Artificial Sequence: Synthetic polynucleotide"
ctgcgcgctcgctcgctcactgaggccgcccgggcgtcgggcgacctttggtcgcccggcctcagtgagcgagcgagcgcgcagagagggagtggccaactccatcactaggggttcctgcggccgcacgcgtctagatcccatatatggagttccgcgttacataacttacggtaaatggcccgcctggctgaccgcccaacgacccccgcccattgacgtcaataatgacgtatgttcccatagtaacgccaatagggactttccattgacgtcaatgggtggagtatttacggtaaactgcccacttggcagtacatcaagtgtatcatatgccaagtacgccccctattgacgtcaatgacggtaaatggcccgcctggcattatgcccagtacatgaccttatgggactttcctacttggcagtacatctacgtattagtcatcgctattaccatggtgatgcggttttggcagtacatcaatgggcgtggatagcggtttgactcacggggatttccaagtctccaccccattgacgtcaatgggagtttgttttggcaccaaaatcaacgggactttccaaaatgtcgtaacaactccgccccattgacgcaaatgggcggtaggcgtgtacggtgggaggtctatataagcagagctcgtttagtgaaccgtcagatcgcctggagacgcaccggtgccaccatggcccctaagaagaagcggaaagtcggcagcggcaagcggaactatatcctgggcctcgacatcggcatcaccagcgttggctacggcatcatcgactacgagacacgggacgtgatcgatgccggcgtgcggctgtttaaagaggccaacgtcgagaacaacgagggccgcagatctaagagaggcgccagacggctgaagcggagaagaaggcacagaatccagagagtgaagaagctgctgttcgactacaacctgctgaccgaccacagcgagctgagcggcatcaatccttacgaggccagagtgaagggcctgagccagaagctgagcgaggaagagtttagcgccgctctgctgcacctggccaagagaagaggcgtgcacaacgtgaacgaggtggaagaggacaccggcaacgagctgtccaccaaagagcagatcagccggaacagcaaggccctggaagagaaatacgtggccgaactgcagctggaacggctgaaaaaggatggcgaagtgcggggcagcatcaatcggttcaagaccagcgactacgtgaaagaagccaaacagctgctgaaggtgcagaaggcctaccaccagctggaccagagcttcatcgacacctacatcgacctgctggaaacccggcggacctactatgaaggacctggcgagggaagccccttcggctggaaggacatcaaagaatggtacgagatgctgatgggccactgcacctactttcccgaggaactgcggagcgtgaagtacgcctacaacgccgacctgtacaacgccctgaacgacctgaacaacctcgtgatcacccgggacgagaacgagaagctggaatattacgagaagttccagatcatcgagaacgtgttcaagcagaagaagaaacccacgctgaagcagatcgccaaagagatcctggtcaacgaggaagatatcaagggctacagagtgaccagcaccggcaagcccgagttcaccaacctgaaggtgtaccacgacatcaaggatatcacagcccggaaagagattattgagaacgccgagctgctggaccaaatcgccaagatcctgaccatctaccagagcagcgaggacatccaagaggaactgaccaatctgaactccgagctgacccaagaagagatcgagcagatctctaatctgaaggggtacaccggcacacacaacctgagcctgaaggccatcaacctgatcctggacgagctgtggcacaccaacgacaaccagattgccatcttcaacaggctgaagctggtgcccaagaaggtggacctgtctcagcagaaagaaatccccaccacactggtggacgacttcattctgagccccgtggtcaagaggagcttcatccagagcatcaaagtgatcaacgccatcatcaagaagtacgggctgcccaacgatatcatcatcgagctggcccgcgagaagaactccaaggacgcccagaaaatgatcaacgagatgcagaagaggaaccgccagaccaacgagcggatcgaggaaatcatccggaccaccggcaaagagaacgccaagtacctgatcgagaagatcaagctgcacgacatgcaagagggcaagtgcctgtacagcctggaagccattcctctggaagatctgctgaacaatcccttcaactatgaggtggaccacatcatccccagaagcgtgtccttcgacaacagcttcaacaacaaggtgctcgtgaagcaagaggaaaacagcaagaagggcaacagaaccccattccagtacctgagcagcagcgacagcaagatcagctacgaaaccttcaagaagcacatcctgaatctggccaaaggcaagggcagaatcagcaagaccaagaaagaatacctgctcgaggaacgggacatcaacagattcagcgtgcagaaagacttcatcaatcggaacctggtggacaccagatacgccaccagaggcctgatgaatctgctgcggagctacttcagagtgaacaatctggacgtgaaagtcaagtccatcaacggcggcttcaccagctttctgcggcggaagtggaagttcaagaaagagcggaacaagggctataagcaccacgccgaggacgccctgatcattgccaacgccgatttcatcttcaaagagtggaagaaactggacaaggccaaaaaagtgatggaaaaccagatgttcgaggaaaagcaggccgagagcatgcccgagatcgaaaccgagcaagagtacaaagagattttcatcacgccccaccagatcaagcacattaaggacttcaaggactacaagtacagccaccgcgtggacaagaagcccaatagagagctgattaacgacaccctgtactctacccggaaggacgacaagggcaataccctgatcgtcaacaacctgaacggcctgtacgacaaggacaacgacaagctcaagaagctgatcaacaagagccccgagaaactgctgatgtaccaccacgatcctcagacctaccagaaactgaagctcatcatggaacagtacggcgacgagaagaatcccctgtacaagtactacgaggaaaccgggaactacctgaccaagtactccaaaaaggacaatgggcccgtgatcaagaagattaagtattacggcaacaagctgaatgcccacctggacatcaccgacgactaccccaacagcagaaacaaggtggtcaagctgtccctgaagccttacagattcgacgtgtacctggacaacggcgtgtacaagttcgtgaccgtgaagaacctggacgtcatcaaaaaagaaaactactacgaagtcaacagcaagtgctatgaggaagccaagaaactcaagaaaatcagcaaccaggccgagtttatcgcctccttctacaacaacgatctgatcaagatcaacggggagctgtatagagtgatcggcgtgaacaatgacctgctgaaccggatcgaagtgaacatgatcgacatcacctaccgcgagtacctcgagaacatgaacgataagcggcctccacggatcattaagacaatcgccagcaagacgcagagcattaagaagtacagcacagacatcctgggcaacctgtacgaagtgaagtctaagaagcacccgcagattatcaagaaaggcagcggcgctcccaagaaaaaacggaaggttggctccggagagggcagaggaagtctgctaacatgcggtgacgtcgaggagaatcctggcccaatggagagcgacgagagcggcctgcccgccatggagatcgagtgccgcatcaccggcaccctgaacggcgtggagttcgagctggtgggcggcggagagggcacccccgagcagggccgcatgaccaacaagatgaagagcaccaaaggcgccctgaccttcagcccctacctgctgagccacgtgatgggctacggcttctaccacttcggcacctaccccagcggctacgagaaccccttcctgcacgccatcaacaacggcggctacaccaacacccgcatcgagaagtacgaggacggcggcgtgctgcacgtgagcttcagctaccgctacgaggccggccgcgtgatcggcgacttcaaggtgatgggcaccggcttccccgaggacagcgtgatcttcaccgacaagatcatccgcagcaacgccaccgtggagcacctgcaccccatgggcgataacgatctggatggcagcttcacccgcaccttcagcctgcgcgacggcggctactacagctccgtggtggacagccacatgcacttcaagagcgccatccaccccagcatcctgcagaacgggggccccatgttcgccttccgccgcgtggaggaggatcacagcaacaccgagctgggcatcgtggagtaccagcacgccttcaagaccccggatgcagatgccggtgaagaataagagctcgctgatcagcctcgataagatacattgatgagtttggacaaaccacaactagaatgcagtgaaaaaaatgctttatttgtgaaatttgtgatgctattgctttatttgtaaccattataagctgcaataaacaagttttaattaaggtcgggcaggaagagggcctatttcccatgattccttcatatttgcatatacgatacaaggctgttagagagataattagaattaatttgactgtaaacacaaagatattagtacaaaatacgtgacgtagaaagtaataatttcttgggtagtttgcagttttaaaattatgttttaaaatggactatcatatgcttaccgtaacttgaaagtatttcgatttcttggctttatatatcttgtggaaaggacgaaacaccgtgctgccgctaccgaggatgggtttaagtactctgtgctggaaacagcacagaatctacttaaacaaggcaaaatgccgtgtttatctcgtcaacttgttggcgagattttttctaaagcttgaattcagctgacgtgcctcggaccgctaggaacccctagtgatggagttggccactccctctctgcgcgctcgctcgctcactgaggccgggcgaccaaaggtcgcccgacgcccgggctttgcccgggcggcctcagtgagcgagcgagcgcgcag

SEQ ID NO: 289 - DNA, 2260 bp, Artificial Sequence
  source: /note="Description of Artificial Sequence: Synthetic polynucleotide"
ctgcgcgctcgctcgctcactgaggccgcccgggcgtcgggcgacctttggtcgcccggcctcagtgagcgagcgagcgcgcagagagggagtggccaactccatcactaggggttcctgcggccgcacgcgtctagatcccatatatggagttccgcgttacataacttacggtaaatggcccgcctggctgaccgcccaacgacccccgcccattgacgtcaataatgacgtatgttcccatagtaacgccaatagggactttccattgacgtcaatgggtggagtatttacggtaaactgcccacttggcagtacatcaagtgtatcatatgccaagtacgccccctattgacgtcaatgacggtaaatggcccgcctggcattatgcccagtacatgaccttatgggactttcctacttggcagtacatctacgtattagtcatcgctattaccatggtgatgcggttttggcagtacatcaatgggcgtggatagcggtttgactcacggggatttccaagtctccaccccattgacgtcaatgggagtttgttttggcaccaaaatcaacgggactttccaaaatgtcgtaacaactccgccccattgacgcaaatgggcggtaggcgtgtacggtgggaggtctatataagcagagctcgtttagtgaaccgtcgtttagtgaaccgtcagatcgcctggagacgcaccggtgccaccatggtgagcaagggcgaggagctgttcaccggggtggtgcccatcctggtcgagctggacggcgacgtaaacggccacaagttcagcgtgtccggcgagggcgagggcgatgccacctacggcaagctgaccctgaagttcatctgcaccaccggcaagctgcccgtgccctggcccaccctcgtgaccaccctgacctacggcgtgcagtgcttcagccgctaccccgaccacatgaagcagcacgacttcttcaagtccgccatgcccgaaggctacgtccaggagcgcaccatcttcttcaaggacgacggcaactacaagacccgcgccgaggtgaagttcgagggcgacaccctggtgaaccgcatcgagctgaagggcatcgacttcaaggaggacggcaacatcctggggcacaagctggagtacaactacaacagccacaacgtctatatcatggccgacaagcagaagaacggcatcaaggtgaacttcaagatccgccacaacatcgaggacggcagcgtgcagctcgccgaccactaccagcagaacacccccatcggcgacggccccgtgctgctgcccgacaaccactacctgagcacccagtccgccctgagcaaagaccccaacgagaagcgcgatcacatggtcctgctggagttcgtgaccgccgccgggatcactctcggcatggacgagctgtacaagtaataataagagctcgctgatcagcctcgactgtgccttctagttgccagccatctgttgtttgcccctcccccgtgccttccttgaccctggaaggtgccactcccactgtcctttcctaataaaatgaggaaattgcatcgcattgtctgagtaggtgtcattctattctggggggtggggtggggcaggacagcaagggggaggattgggaagacaatagcaggcatgctggggatgcggtgggctctatggttaattaaggtcgggcaggaagagggcctatttcccatgattccttcatatttgcatatacgatacaaggctgttagagagataattagaattaatttgactgtaaacacaaagatattagtacaaaatacgtgacgtagaaagtaataatttcttgggtagtttgcagttttaaaattatgttttaaaatggactatcatatgcttaccgtaacttgaaagtatttcgatttcttggctttatatatcttgtggaaaggacgaaacaccgaggagcaccaggaacttgccagtttaagtactctgtgctggaaacagcacagaatctacttaaacaaggcaaaatgccgtgtttatctcgtcaacttgttggcgagattttttctaaagcttgaattcaagcttgaattcagctgacgtgcctcggaccgctaggaacccctagtgatggagttggccactccctctctgcgcgctcgctcgctcactgaggccgggcgaccaaaggtcgcccgacgcccgggctttgcccgggcggcctcagtgagcgagcgagcgcgcag

SEQ ID NO: 290 - DNA, 2260 bp, Artificial Sequence
  source: /note="Description of Artificial Sequence: Synthetic polynucleotide"
ctgcgcgctcgctcgctcactgaggccgcccgggcgtcgggcgacctttggtcgcccggcctcagtgagcgagcgagcgcgcagagagggagtggccaactccatcactaggggttcctgcggccgcacgcgtctagatcccatatatggagttccgcgttacataacttacggtaaatggcccgcctggctgaccgcccaacgacccccgcccattgacgtcaataatgacgtatgttcccatagtaacgccaatagggactttccattgacgtcaatgggtggagtatttacggtaaactgcccacttggcagtacatcaagtgtatcatatgccaagtacgccccctattgacgtcaatgacggtaaatggcccgcctggcattatgcccagtacatgaccttatgggactttcctacttggcagtacatctacgtattagtcatcgctattaccatggtgatgcggttttggcagtacatcaatgggcgtggatagcggtttgactcacggggatttccaagtctccaccccattgacgtcaatgggagtttgttttggcaccaaaatcaacgggactttccaaaatgtcgtaacaactccgccccattgacgcaaatgggcggtaggcgtgtacggtgggaggtctatataagcagagctcgtttagtgaaccgtcgtttagtgaaccgtcagatcgcctggagacgcaccggtgccaccatggtgagcaagggcgaggagctgttcaccggggtggtgcccatcctggtcgagctggacggcgacgtaaacggccacaagttcagcgtgtccggcgagggcgagggcgatgccacctacggcaagctgaccctgaagttcatctgcaccaccggcaagctgcccgtgccctggcccaccctcgtgaccaccctgacctacggcgtgcagtgcttcagccgctaccccgaccacatgaagcagcacgacttcttcaagtccgccatgcccgaaggctacgtccaggagcgcaccatcttcttcaaggacgacggcaactacaagacccgcgccgaggtgaagttcgagggcgacaccctggtgaaccgcatcgagctgaagggcatcgacttcaaggaggacggcaacatcctggggcacaagctggagtacaactacaacagccacaacgtctatatcatggccgacaagcagaagaacggcatcaaggtgaacttcaagatccgccacaacatcgaggacggcagcgtgcagctcgccgaccactaccagcagaacacccccatcggcgacggccccgtgctgctgcccgacaaccactacctgagcacccagtccgccctgagcaaagaccccaacgagaagcgcgatcacatggtcctgctggagttcgtgaccgccgccgggatcactctcggcatggacgagctgtacaagtaataataagagctcgctgatcagcctcgactgtgccttctagttgccagccatctgttgtttgcccctcccccgtgccttccttgaccctggaaggtgccactcccactgtcctttcctaataaaatgaggaaattgcatcgcattgtctgagtaggtgtcattctattctggggggtggggtggggcaggacagcaagggggaggattgggaagacaatagcaggcatgctggggatgcggtgggctctatggttaattaaggtcgggcaggaagagggcctatttcccatgattccttcatatttgcatatacgatacaaggctgttagagagataattagaattaatttgactgtaaacacaaagatattagtacaaaatacgtgacgtagaaagtaataatttcttgggtagtttgcagttttaaaattatgttttaaaatggactatcatatgcttaccgtaacttgaaagtatttcgatttcttggctttatatatcttgtggaaaggacgaaacaccgaagccgaaaaccacgatcatcgtttaagtactctgtgctggaaacagcacagaatctacttaaacaaggcaaaatgccgtgtttatctcgtcaacttgttggcgagattttttctaaagcttgaattcaagcttgaattcagctgacgtgcctcggaccgctaggaacccctagtgatggagttggccactccctctctgcgcgctcgctcgctcactgaggccgggcgaccaaaggtcgcccgacgcccgggctttgcccgggcggcctcagtgagcgagcgagcgcgcag

SEQ ID NO: 291 - DNA, 2260 bp, Artificial Sequence
  source: /note="Description of Artificial Sequence: Synthetic polynucleotide"
ctgcgcgctcgctcgctcactgaggccgcccgggcgtcgggcgacctttggtcgcccggcctcagtgagcgagcgagcgcgcagagagggagtggccaactccatcactaggggttcctgcggccgcacgcgtctagatcccatatatggagttccgcgttacataacttacggtaaatggcccgcctggctgaccgcccaacgacccccgcccattgacgtcaataatgacgtatgttcccatagtaacgccaatagggactttccattgacgtcaatgggtggagtatttacggtaaactgcccacttggcagtacatcaagtgtatcatatgccaagtacgccccctattgacgtcaatgacggtaaatggcccgcctggcattatgcccagtacatgaccttatgggactttcctacttggcagtacatctacgtattagtcatcgctattaccatggtgatgcggttttggcagtacatcaatgggcgtggatagcggtttgactcacggggatttccaagtctccaccccattgacgtcaatgggagtttgttttggcaccaaaatcaacgggactttccaaaatgtcgtaacaactccgccccattgacgcaaatgggcggtaggcgtgtacggtgggaggtctatataagcagagctcgtttagtgaaccgtcgtttagtgaaccgtcagatcgcctggagacgcaccggtgccaccatggtgagcaagggcgaggagctgttcaccggggtggtgcccatcctggtcgagctggacggcgacgtaaacggccacaagttcagcgtgtccggcgagggcgagggcgatgccacctacggcaagctgaccctgaagttcatctgcaccaccggcaagctgcccgtgccctggcccaccctcgtgaccaccctgacctacggcgtgcagtgcttcagccgctaccccgaccacatgaagcagcacgacttcttcaagtccgccatgcccgaaggctacgtccaggagcgcaccatcttcttcaaggacgacggcaactacaagacccgcgccgaggtgaagttcgagggcgacaccctggtgaaccgcatcgagctgaagggcatcgacttcaaggaggacggcaacatcctggggcacaagctggagtacaactacaacagccacaacgtctatatcatggccgacaagcagaagaacggcatcaaggtgaacttcaagatccgccacaacatcgaggacggcagcgtgcagctcgccgaccactaccagcagaacacccccatcggcgacggccccgtgctgctgcccgacaaccactacctgagcacccagtccgccctgagcaaagaccccaacgagaagcgcgatcacatggtcctgctggagttcgtgaccgccgccgggatcactctcggcatggacgagctgtacaagtaataataagagctcgctgatcagcctcgactgtgccttctagttgccagccatctgttgtttgcccctcccccgtgccttccttgaccctggaaggtgccactcccactgtcctttcctaataaaatgaggaaattgcatcgcattgtctgagtaggtgtcattctattctggggggtggggtggggcaggacagcaagggggaggattgggaagacaatagcaggcatgctggggatgcggtgggctctatggttaattaaggtcgggcaggaagagggcctatttcccatgattccttcatatttgcatatacgatacaaggctgttagagagataattagaattaatttgactgtaaacacaaagatattagtacaaaatacgtgacgtagaaagtaataatttcttgggtagtttgcagttttaaaattatgttttaaaatggactatcatatgcttaccgtaacttgaaagtatttcgatttcttggctttatatatcttgtggaaaggacgaaacaccgaagccaaagaccacaatcatcgtttaagtactctgtgctggaaacagcacagaatctacttaaacaaggcaaaatgccgtgtttatctcgtcaacttgttggcgagattttttctaaagcttgaattcaagcttgaattcagctgacgtgcctcggaccgctaggaacccctagtgatggagttggccactccctctctgcgcgctcgctcgctcactgaggccgggcgaccaaaggtcgcccgacgcccgggctttgcccgggcggcctcagtgagcgagcgagcgcgcag

SEQ ID NO: 292 - DNA, 12 bp, Artificial Sequence
  source: /note="Description of Artificial Sequence: Synthetic oligonucleotide"
aacgagcagtaa

SEQ ID NO: 293 - DNA, 31 bp, Artificial Sequence
  source: /note="Description of Artificial Sequence: Synthetic oligonucleotide"
gtcatccgctccatcaggattctcaagttcc

SEQ ID NO: 294 - RNA, 31 nt, Artificial Sequence
  source: /note="Description of Artificial Sequence: Synthetic oligonucleotide"
gucauccgcuccaucaggauucucaaguucc

SEQ ID NO: 295 - RNA, 21 nt, Artificial Sequence
  source: /note="Description of Artificial Sequence: Synthetic oligonucleotide"
uugagaauccugauggagcgg

SEQ ID NO: 296 - DNA, 65 bp, Artificial Sequence
  source: /note="Description of Artificial Sequence: Synthetic oligonucleotide"
ctgttgagaatcctgatggagcgggtttttgcctccaactgacccgctcataggattctcaacag

SEQ ID NO: 297 - DNA, 277 bp, Artificial Sequence; identical to SEQ ID NO: 101
  source: /note="Description of Artificial Sequence: Synthetic polynucleotide"

SEQ ID NO: 298 - DNA, 660 bp, Artificial Sequence
  source: /note="Description of Artificial Sequence: Synthetic polynucleotide"
gacattgattattgactagttattaatagtaatcaattacggggtcattagttcatagcccatatatggagttccgcgttacataacttacggtaaatggcccgcctggctgaccgcccaacgacccccgcccattgacgtcaataatgacgtatgttcccatagtaacgccaatagggactttccattgacgtcaatgggtggactatttacggtaaactgcccacttggcagtacatcaagtgtatcatatgccaagtacgccccctattgacgtcaatgacggtaaatggcccgcctggcattatgcccagtacatgaccttatgggactttcctacttggcagtacatctacgtattagtcatcgctattaccatgggtcgaggtgagccccacgttctgcttcactctccccatctcccccccctccccacccccaattttgtatttatttattttttaattattttgtgcagcgatgggggcggggggggggggggggcgcgcgccaggcggggcggggcggggcgaggggcggggcggggcgaggcggagaggtgcggcggcagccaatcagagcggcgcgctccgaaagtttccttttatggcgaggcggcggcggcggcggccctataaaaagcgaagcgcgcggcgggcg

SEQ ID NO: 299 - DNA, 658 bp, Artificial Sequence
  source: /note="Description of Artificial Sequence: Synthetic polynucleotide"
gacattgattattgactagttattaatagtaatcaattacggggtcattagttcatagcccatatatggagttccgcgttacataacttacggtaaatggcccgcctggctgaccgcccaacgacccccgcccattgacgtcaataatgacgtatgttcccatagtaacgccaatagggactttccattgacgtcaatgggtggactatttacggtaaactgcccacttggcagtacatcaagtgtatcatatgccaagtacgccccctattgacgtcaatgacggtaaatggcccgcctggcattatgcccagtacatgaccttatgggactttcctacttggcagtacatctacgtattagtcatcgctattaccatgggtcgaggtgagccccacgttctgcttcactctccccatctcccccccctccccacccccaattttgtatttatttattttttaattattttgtgcagcgatgggggcggggggggggggggcgcgcgccaggcggggcggggcggggcgaggggcggggcggggcgaggcggagaggtgcggcggcagccaatcagagcggcgcgctccgaaagtttccttttatggcgaggcggcggcggcggcggccctataaaaagcgaagcgcgcggcgggcg

SEQ ID NO: 300 - DNA, 1673 bp, Artificial Sequence
  source: /note="Description of Artificial Sequence: Synthetic polynucleotide"
gacattgattattgactagttattaatagtaatcaattacggggtcattagttcatagcccatatatggagttccgcgttacataacttacggtaaatggcccgcctggctgaccgcccaacgacccccgcccattgacgtcaataatgacgtatgttcccatagtaacgccaatagggactttccattgacgtcaatgggtggactatttacggtaaactgcccacttggcagtacatcaagtgtatcatatgccaagtacgccccctattgacgtcaatgacggtaaatggcccgcctggcattatgcccagtacatgaccttatgggactttcctacttggcagtacatctacgtattagtcatcgctattaccatgggtcgaggtgagccccacgttctgcttcactctccccatctcccccccctccccacccccaattttgtatttatttattttttaattattttgtgcagcgatgggggcggggggggggggggggcgcgcgccaggcggggcggggcggggcgaggggcggggcggggcgaggcggagaggtgcggcggcagccaatcagagcggcgcgctccgaaagtttccttttatggcgaggcggcggcggcggcggccctataaaaagcgaagcgcgcggcgggcgggagtcgctgcgttgccttcgccccgtgccccgctccgcgccgcctcgcgccgcccgccccggctctgactgaccgcgttactcccacaggtgagcgggcgggacggcccttctcctccgggctgtaattagcgcttggtttaatgacggctcgtttcttttctgtggctgcgtgaaagccttaaagggctccgggagggccctttgtgcgggggggagcggctcggggggtgcgtgcgtgtgtgtgtgcgtggggagcgccgcgtgcggcccgcgctgcccggcggctgtgagcgctgcgggcgcggcgcggggctttgtgcgctccgcgtgtgcgcgaggggagcgcggccgggggcggtgccccgcggtgcgggggggctgcgaggggaacaaaggctgcgtgcggggtgtgtgcgtgggggggtgagcagggggtgtgggcgcggcggtcgggctgtaacccccccctgcacccccctccccgagttgctgagcacggcccggcttcgggtgcggggctccgtgcggggcgtggcgcggggctcgccgtgccgggcggggggtggcggcaggtgggggtgccgggcggggcggggccgcctcgggccggggagggctcgggggaggggcgcggcggcccccggagcgccggcggctgtcgaggcgcggcgagccgcagccattgccttttatggtaatcgtgcgagagggcgcagggacttcctttgtcccaaatctgtgcggagccgaaatctgggaggcgccgccgcaccccctctagcgggcgcggggcgaagcggtgcggcgccggcaggaaggaaatgggcggggagggccttcgtgcgtcgccgcgccgccgtccccttctccctctccagcctcggggctgtccgcggggggacggctgccttcgggggggacggggcagggcggggttcggcttctggcgtgtgaccggcggctctagagcctctgctaaccatgttcatgccttcttctttttcctacag

SEQ ID NO: 301 - DNA, 1671 bp, Artificial Sequence
  source: /note="Description of Artificial Sequence: Synthetic polynucleotide"
gacattgattattgactagttattaatagtaatcaattacggggtcattagttcatagcccatatatggagttccgcgttacataacttacggtaaatggcccgcctggctgaccgcccaacgacccccgcccattgacgtcaataatgacgtatgttcccatagtaacgccaatagggactttccattgacgtcaatgggtggactatttacggtaaactgcccacttggcagtacatcaagtgtatcatatgccaagtacgccccctattgacgtcaatgacggtaaatggcccgcctggcattatgcccagtacatgaccttatgggactttcctacttggcagtacatctacgtattagtcatcgctattaccatgggtcgaggtgagccccacgttctgcttcactctccccatctcccccccctccccacccccaattttgtatttatttattttttaattattttgtgcagcgatgggggcggggggggggggggcgcgcgccaggcggggcggggcggggcgaggggcggggcggggcgaggcggagaggtgcggcggcagccaatcagagcggcgcgctccgaaagtttccttttatggcgaggcggcggcggcggcggccctataaaaagcgaagcgcgcggcgggcgggagtcgctgcgttgccttcgccccgtgccccgctccgcgccgcctcgcgccgcccgccccggctctgactgaccgcgttactcccacaggtgagcgggcgggacggcccttctcctccgggctgtaattagcgcttggtttaatgacggctcgtttcttttctgtggctgcgtgaaagccttaaagggctccgggagggccctttgtgcgggggggagcggctcggggggtgcgtgcgtgtgtgtgtgcgtggggagcgccgcgtgcggcccgcgctgcccggcggctgtgagcgctgcgggcgcggcgcggggctttgtgcgctccgcgtgtgcgcgaggggagcgcggccgggggcggtgccccgcggtgcgggggggctgcgaggggaacaaaggctgcgtgcggggtgtgtgcgtgggggggtgagcagggggtgtgggcgcggcggtcgggctgtaacccccccctgcacccccctccccgagttgctgagcacggcccggcttcgggtgcggggctccgtgcggggcgtggcgcggggctcgccgtgccgggcggggggtggcggcaggtgggggtgccgggcggggcggggccgcctcgggccggggagggctcgggggaggggcgcggcggcccccggagcgccggcggctgtcgaggcgcggcgagccgcagccattgccttttatggtaatcgtgcgagagggcgcagggacttcctttgtcccaaatctgtgcggagccgaaatctgggaggcgccgccgcaccccctctagcgggcgcggggcgaagcggtgcggcgccggcaggaaggaaatgggcggggagggccttcgtgcgtcgccgcgccgccgtccccttctccctctccagcctcggggctgtccgcggggggacggctgccttcgggggggacggggcagggcggggttcggcttctggcgtgtgaccggcggctctagagcctctgctaaccatgttcatgccttcttctttttcctacag

SEQ ID NO: 302 - DNA, 1725 bp, Homo sapiens
ctatggagtttgcataacaaacgtttggcagctcgctctcttacactccattaacaagctgtaacatatagctgcaggttgctataatctcattaatattttggaaacttgaatattgagtatttctgagtgctcattccccatatgccagccacttctgccatgctgactggttcctttctctccattattagcaattagcttcttaccttccaaagtcagatccaaggtatccaagatactagcaaaggaatcaactatgtgtgcaagttaagcatgcttaatatcacccaaacaaacaaagaggcagcatttcttaaagtaatgaagatagataaatcgggttagtcctttgcgacactgctggtgctttctagagttttatatattttaagcagcttgctttatattctgtctttgcctcccaccccaccagcacttttatttgtggagggttttggctcgccacactttgggaaacttatttgatttcacggagagctgaaggaagatcatttttggcaacagacaagtttaaacacgatttctatgggacattgctaactggggcccctaaggagaaaggggaaactgagcggagaatgggttaaatccttggaagcaggggagaggcaggggaggagagaagtcggaggagtataaagaaaaggacaggaaccaagaagcgtgggggtggtttgccgtaatgtgagtgtttcttaattagagaacggttgacaatagagggtctggcagaggctcctggccgcggtgcggagcgtctggagcggagcacgcgctgtcagctggtgagcgcactctcctttcaggcagctccccggggagctgtgcggccacatttaacaccatcatcacccctccccggcctcctcaacctcggcctcctcctcgtcgacagccttccttggcccccaccagcagagctcacagtagcgagcgtctctcgccgtctcccgcactcggccggggcctctctcctcccccagctgcgcagcgggagccgccactgcccactgcacctcccagcaaccagcccagcacgcaaagaagctgcgcaaagttaaagccaagcaatgccaaggggaggggaagctggaggcgggctttgagtggcttctgggcgcctggcgggtccagaatcgcccagagccgcccgcggtcgtgcacatctgacccgagtcagcttgggcaccagccgagagccggctccgcaccgctcccgcaccccagccgccggggtggtgacacacaccggagtcgaattacagccctgcaattaacatatgaatctgacgaatttaaaagaaggaaaaaaaaaaaaaaacctgagcaggcttgggagtcctctgcacacaagaacttttctcggggtgtaaaaactctttgattggctgctcgcacgcgcctgcccgcgccctccattggctgagaagacacgcgaccggcgcgaggagggggttgggagaggagcggggggagactgagtggcgcgtgccgctttttaaaggggcgcagcgccttcagcaaccggagaagcatagttgcacgcgacctggtgtgtgatctccgagtgggtgggggagggtcgaggagggaaaaaaaaataagacgttgcagaagagacccggaaagggccttttttttggttgagctggtgtcccagtgctgcctccgatcctgagcctccgagcctttgcagtgcaa

SEQ ID NO: 303 - DNA, 60 bp, Homo sapiens
ctgccttctgagagcgctataaaggcagcggaagggtagtccgcggggcattccgggcgg

SEQ ID NO: 304 - DNA, 60 bp, Homo sapiens
ctctaggcgggctctgctcttctttaaggagtcccacagggcctggcccgcccctgacct

SEQ ID NO: 305 - DNA, 2000 bp, Homo sapiens
taaagagttgtgagttgtgtaggtgagttgccatggagctacaaatatgagttgatattctgaaatcctagacagccatctccaaggttaagaaaaatccttatgcactcacttgcaaagatatccacagcatgctcttaatggagaaaaacaaagccttagatcaaatatgtaaagtaatttttagttttttgaaaaggtatgtttgggctatagataaatctgttcaaaaaacatgagagaagataataatggttgaaaggagacacagtgcttgccctcaagaagtttttgtctagtgagggagagagaacttgtatgtaaataaaattgtgttactaaggtagatagtgagaagtaacttaagagaggatcagataaggtattaagagaatacagaaaagggtctggattaattctgaacagcatcaaagaatgttcttgcaagagatagtgttttcaccagatcttgaaggtatggatgagggtatacagagtgagtatattcagattctactttaaaacaaatactttcctctgttgtagtggagttgagctatacatccaacaataatgaaaaaatacacgcatatatacatatatggagagagatacatattttagtacatgtagcaattgattaataaatgtacagtttaagtcgcatgcaaaaccttggagtgatagcaaacttcattgtaggatgtttagcagcatctctggtctctactcactagatcccaatagcatctccctaggtgtgacaaccaaaaatgtctccaggcattgacctctggaggcaaaaaaagccctttattaagaaccagtggtatacataagtaaaacatacacaagagattcctcccctcttctctgtatgtgaataaaaattgcaaagttcatgacctggattttccttttaggtttcttctttagtggttcttaacttcattgggtgaagtaagcctttgaagatctgttgaaagctgttgactcattcacttctcaggaaaacgcacatgctgactaccatttcagagaatttgcatcagggttctctggggaggagttctgagttctgtttccaggagctcgtagaattgtcatggtctgcatatgcaaggcaggtggattacggaaggttgatgtacagaggtctgtattttggagcctcttctgtatttacttcagaacactaacaatcaggcgagaatgttctggtttatcaaacccttccttctgcctttcatcttaaccatgcattagttttaacaaagttcatcccaacagaagacaaaacactgatgaggtaggatagctccagctcctcctccctctcttctagtcttgatttccatgtagtccagtttattccttccctgattgtccaggagaatgagaaaaagaaaaaacagagtctagtgggtaagaaagggccacctggacggcttgatttggattgtgaaataaaacacacacacatgcacacgtagaataagtggctaaaatctgagtaaatcgtgaactctctgtatcctccacccattgaatactcctaaaagactttctagaaattcaaggacttattaatatagaaacctggccattgttcctcttctcctccccatgtggtatgagagcacctgtggcaggctcccagagaccacggacctcttcctctaggcgggctctgctcttctttaaggagtcccacagggcctggcccgcccctgacctcgcaacccttgagattagtaacgggatgagtgaggatccgggtggcccctgcgtggcagccagtaagagtctcagccttcccggttcgggaaaggggaagaatgcaggaggggtaggatttctttcctgataggatcggttgggaaagaccgcagcctgtgtgtgtctttcccttcgaccaaggtgtctgttgctccgtaaataaaacgtcccactgccttctgagagcgctataaaggcagcggaagggtagtccgcggggc

SEQ ID NO: 306 - DNA, 1400 bp, Homo sapiens
ggctgctcggaaaacaggacgaggggagagacttgctcaataagctgaaagttctgcccccgagagggctgcgacagctgctggaatgtgcctgcagcgtccgcctcttggggacccgcggagcgcgccctgacggttccacgcctggcccgggggtctgcacctctcctccagtgcgcacctggagctgcgtcccgggtcaggtgcggggagggagggaatctcagtgtccccttccagccttgcaagcgcctttggcccctgccccagcccctcggtttgggggagatttcagaacgcggacagcgccctggctgcgggccataggggactgggtggaactcgggaagcccccagagcaggggcttactcgcttcaagtttggggaaccccgggcagcgggtgcaggccacgagacccgaaggttctcaggtgcccccctgcaggctggccgtgcgcgccgtggggcgcttgtcgcgagcgccgagggctgcaggacgcggaccagactcgcggtgcaggggggcctggctgcagctaacaggtgatcccgttctttctgttcctcgctcttcccctccgatcgtcctcgcttaccgcgtgtcctccctcctcgctgtcctctggctcgcaggtcatggcagcgccaggcggcaggtcggagccgccgcagctccccgagtacagctgcagctacatggtgtcgcggccggtctacagcgagctcgctttccagcaacagcacgagcggcgcctgcaggagcgcaagacgctgcgggagagcctggccaagtgctgcaggtagcggccgcgcgggcctgcgtagagagaagcggagcggggcgtccacgccttggggagggaagggcgtccccagcgggcgagagtggggtgcgggcggcggagcccctgggcgccagctgcttctcccagaggcccgactttcggtctccggtcctccacgccgcccttctggtgggagggtggctccatcagtctcgggcccgaaatgaacttacctgggaaactcgcctttggggagagtgggttctaggagccccgtctctctttttcctctctgaaggaaacttggagtgcctcttggggtacagtgggtccctgttgccttcttgggagcttgtttaaatgaaatgaatagggaaacccagctcttgaccaggaggagtccttgaaacactcaagctaagtaggcgggctaccattcagttagagaccaggatgcaagctagaacccaggggagcgcggggtgtgccaagtacttcatcagcaggctgtgggacccctggggaaagccaccctcagtctctaaacccaaacatgccgtaactagatgtcacaaacataaagaaattagagtttctaaaacctttcattatag

SEQ ID NO: 307 - DNA, 900 bp, Homo sapiens
cggaaggttgatgtacagaggtctgtattttggagcctcttctgtatttacttcagaacactaacaatcaggcgagaatgttctggtttatcaaacccttccttctgcctttcatcttaaccatgcattagttttaacaaagttcatcccaacagaagacaaaacactgatgaggtaggatagctccagctcctcctccctctcttctagtcttgatttccatgtagtccagtttattccttccctgattgtccaggagaatgagaaaaagaaaaaacagagtctagtgggtaagaaagggccacctggacggcttgatttggattgtgaaataaaacacacacacatgcacacgtagaataagtggctaaaatctgagtaaatcgtgaactctctgtatcctccacccattgaatactcctaaaagactttctagaaattcaaggacttattaatatagaaacctggccattgttcctcttctcctccccatgtggtatgagagcacctgtggcaggctcccagagaccacggacctcttcctctaggcgggctctgctcttctttaaggagtcccacagggcctggcccgcccctgacctcgcaacccttgagattagtaacgggatgagtgaggatccgggtggcccctgcgtggcagccagtaagagtctcagccttcccggttcgggaaaggggaagaatgcaggaggggtaggatttctttcctgataggatcggttgggaaagaccgcagcctgtgtgtgtctttcccttcgaccaaggtgtctgttgctccgtaaataaaacgtcccactgccttctgagagcgctataaaggcagcggaagggtagtccgcggggcattccgggcggggcgcgagcagagacaggtgagtt

SEQ ID NO: 308 - DNA, 1269 bp, Homo sapiens
agggctatttgtacctcaacgagggcttctctccaagaaagccctgaatccttttcctcctttttcctgcagattcactataggacactttttgaagcaagagcatgcattttccccctggcgctctgcagcggttctcagagcccagtgtcactcacataggtgggactgctctcagttcagagagcgctgggacacttaagatgaaaagtccctggaagttagcaaacagccatctgtcactctggcatcgatttactaaaagtgacttctagggtattctaaaccacttttaaaaaacaaatgagtcacttcgacttcctcaccccgcaagagataggaaggcagcagtggagtgctcgctcaggagctgtatttgtttagcgattagcctagagctttgattttagggcaaaagcgagccagacagtgcggcagacgtaaggatcaaaaaggccacctatcattcgccggggacgcctgcctccttaccctgataacgtaactatttctctgcataggattttagtttttgtgtttttgttttgttttattctgtttaatcacttcaagtatctcatccattatttgaagcgggctcggaggaaacgtgccgcatcctccagtccttgtgcgtctgtttaggtctctccgaagcaggtccctctcgactcttagatctgggtctccagcacgcatgaaggggtaagggtgggggggtcccctattccggcgcgcggcgttgagcactgaatcttccaggcggaggctcagtgggagcgccgagaactcgccagtaccgcgcgctgcctgctgcctgctgcctcccagcccaggacttgggaaaggagggaggggacaagtggagggaaagtggggccgggcggggggtgcctgggaagccaggctgcgctgacgtcactgggcgcgcaattcgggctggagcgctttaaaaaacgagcgtgcaagcagagatgctgctccacaccgctcaggccgcgagcagcagcaaggcgcaccgccactgtcgccgctgcagccagggctgctccgaaggccggcgtggcggcaaccggcacctctgtccccgccgcgcttctcctcgccgcccacgccgtggggtcaggaacgcggcgtctggcgctgcagacgcccgctgagttgcagaagcccacggagcggcgcccggcgcgccacggcccgtagcagtccggtgctgctctccgcccgcgtccggctcgtggccccctacttcgggcaccgaccggt

SEQ ID NO: 309 - DNA, 463 bp, Homo sapiens
tgcgtatgagtgcaagtgggttttaggaccaggatgaggcggggtgggggtgcctacctgacgaccgaccccgacccactggacaagcacccaacccccattccccaaattgcgcatcccctatcagagagggggaggggaaacaggatgcggcgaggcgcgtgcgcactgccagcttcagcaccgcggacagtgccttcgcccccgcctggcggcgcgcgccaccgccgcctcagcactgaaggcgcgctgacgtcactcgccggtcccccgcaaactccccttcccggccaccttggtcgcgtccgcgccgccgccggcccagccggaccgcaccacgcgaggcgcgagataggggggcacgggcgcgaccatctgcgctgcggcgccggcgactcagcgctgcctcagtctgcggtgggcagcggaggagtcgtgtcgtgcctgagagcgcagtcgagaa

SEQ ID NO: 310 - DNA, 2204 bp, Homo sapiens
cccacctccctctctgtgctgggactcacagagggagacctcaggaggcagtctgtccatcacatgtccaaatgcagagcataccctgggctgggcgcagtggcgcacaactgtaattccagcactttgggaggctgatgtggaaggatcacttgagcccagaagttctagaccagcctgggcaacatggcaagaccctatctctacaaaaaaagttaaaaaatcagccacgtgtggtgacacacacctgtagtcccagctattcaggaggctgaggtgaggggatcacttaaggctgggaggttgaggctgcagtgagtcgtggttgcgccactgcactccagcctgggcaacagtgagaccctgtctcaaaagacaaaaaaaaaaaaaaaaaaaaaaagaacatatcctggtgtggagtaggggacgctgctctgacagaggctcgggggcctgagctggctctgtgagctggggaggaggcagacagccaggccttgtctgcaagcagacctggcagcattgggctggccgccccccagggcctcctcttcatgcccagtgaatgactcaccttggcacagacacaatgttcggggtgggcacagtgcctgcttcccgccgcaccccagcccccctcaaatgccttccgagaagcccattgagcagggggcttgcattgcaccccagcctgacagcctggcatcttgggataaaagcagcacagccccctaggggctgcccttgctgtgtggcgccaccggcggtggagaacaaggctctattcagcctgtgcccaggaaaggggatcaggggatgcccaggcatggacagtgggtggcagggggggagaggagggctgtctgcttcccagaagtccaaggacacaaatgggtgaggggactgggcagggttctgaccctgtgggaccagagtggagggcgtagatggacctgaagtctccagggacaacagggcccaggtctcaggctcctagttgggcccagtggctccagcgtttccaaacccatccatccccagaggttcttcccatctctccaggctgatgtgtgggaactcgaggaaataaatctccagtgggagacggaggggtggccagggaaacggggcgctgcaggaataaagacgagccagcacagccagctcatgtgtaacggctttgtggagctgtcaaggcctggtctctgggagagaggcacagggaggccagacaaggaaggggtgacctggagggacagatccaggggctaaagtcctgataaggcaagagagtgccggccccctcttgccctatcaggacctccactgccacatagaggccatgattgacccttagacaaagggctggtgtccaatcccagcccccagccccagaactccagggaatgaatgggcagagagcaggaatgtgggacatctgtgttcaagggaaggactccaggagtctgctgggaatgaggcctagtaggaaatgaggtggcccttgagggtacagaacaggttcattcttcgccaaattcccagcaccttgcaggcacttacagctgagtgagataatgcctgggttatgaaatcaaaaagttggaaagcaggtcagaggtcatctggtacagcccttccttcccttttttttttttttttttgtgagacaaggtctctctctgttgcccaggctggagtggcgcaaacacagctcactgcagcctcaacctactgggctcaagcaatcctccagcctcagcctcccaaagtgctgggattacaagcatgagccaccccactcagccctttccttcctttttaattgatgcataataattgtaagtattcatcatggtccaaccaaccctttcttgacccaccttcctagagagagggtcctcttgcttcagcggtcagggccccagacccatggtctggctccaggtaccacctgcctcatgcaggagttggcgtgcccaggaagctctgcctctgggcacagtgacctcagtggggtgaggggagctctccccatagctgggctgcggcccaaccccaccccctcaggctatgccagggggtgttgccaggggcacccgggcatcgccagtctagcccactccttcataaagccctcgcatcccaggagcgagcagagccagagcaggttggagaggagacgcatcacctccgctgctcgc
